(19) United States
(12) Patent Application Publication
(10) Pub. No.: US 2025/0043001 A1
(43) Pub. Date: Feb. 6, 2025

(54) ANTI-CD28 COMPOSITIONS

(71) Applicant: Xencor, Inc., Pasadena, CA (US)

(72) Inventors: Gregory Moore, Azusa, CA (US); Viralkumar Rameshkumar Davra, Chino, CA (US); Dong Hyun Nam, Monterey Park, CA (US); Veronica Gusti Zeng, Duarte, CA (US); Michael Hedvat, Encino, CA (US); Jing Qi, Arcadia, CA (US); Rumana Rashid, Temple City, CA (US); Patrick Arpp, Pasadena, CA (US); Ernesto Delgado, Rancho Cucamonga, CA (US); ChaoFang Tan, Arcadia, CA (US); Heather Preciado Jimenez, Upland, CA (US); Charles G. Bakhit, La Verne, CA (US); Juan Diaz, Anaheim Hills, CA (US)

(21) Appl. No.: 18/605,762

(22) Filed: Mar. 14, 2024

Related U.S. Application Data
(60) Provisional application No. 63/490,167, filed on Mar. 14, 2023.
(60) Provisional application No. 63/496,374, filed on Apr. 14, 2023.
(60) Provisional application No. 63/490,171, filed on Mar. 14, 2023.
(60) Provisional application No. 63/495,989, filed on Apr. 13, 2023.
(60) Provisional application No. 63/578,592, filed on Aug. 24, 2023.

(51) Int. Cl. C07K 16/28; C07K 16/30; C07K 16/46

(52) U.S. Cl. CPC C07K 16/2818; C07K 16/3069; C07K 16/468; C07K 2317/31; C07K 2317/51; C07K 2317/515; C07K 2317/52; C07K 2317/622

(57) ABSTRACT

Provided herein are novel anti-CD28 x anti-STEAP1 and anti-CD28 x anti-CEACAM5 antibodies and methods of using such antibodies for the treatment of related cancers.

### PRIORITY CLAIM

[0001] This application claims priority to and the benefit of United States Provisional Application Nos. 63/490,167, filed Mar. 14, 2023; 63/496,374, filed Apr. 14, 2023; 63/490,171, filed Mar. 14, 2023; 63/495,989, filed Apr. 13, 2023; and 63/578,592, filed Aug. 24, 2023, the contents of which are hereby incorporated by reference in their entirety.

### SEQUENCE LISTING

[0002] The instant application contains a Sequence Listing which has been submitted electronically in XML format and is hereby incorporated by reference in its entirety. Said XML copy, created on May 7, 2024, is named 067461-5313-US_SL.xml and is 3,451,619 bytes in size.

### BACKGROUND

[0003] Antibody-based therapeutics have been used successfully to treat a variety of diseases, including cancer. An increasingly prevalent avenue being explored is the engineering of single immunoglobulin molecules that co-engage two different antigens. Such alternate antibody formats that engage two different antigens are often referred to as bispecific antibodies. One particular approach for bispecific antibodies is to engineer a first binding domain which engages CD3 and a second binding domain which engages an antigen associated with or upregulated on cancer cells so that the bispecific antibody redirects CD3⁺ T cells to destroy the cancer cells.

[0004] TILs, however, lose their cytotoxic ability over time due to upregulation of inhibitory immune checkpoints. While checkpoint blockade has demonstrated increased clinical response rates relative to other treatment options, many patients still fail to achieve a response to checkpoint blockade. Engagement of costimulatory receptors on TILs could provide a positive signal capable of overcoming negative signals of immune checkpoints. Preclinical and clinical studies of agonistic costimulatory receptor antibodies have indeed demonstrated that agonism of costimulatory receptors can result in impressive anti-tumor responses, activating T cells to attack tumor cells.

[0005] It is also important for cancer therapy to enhance anti-tumor activity by specifically destroying tumor cells while minimizing peripheral toxicity. In this context, it is crucial that only T cells in the presence of the target tumor cells are provided a costimulatory signal. However, agonism of costimulatory receptors with monospecific full-length antibodies is likely nondiscriminatory with regards to TILs vs. peripheral T cells vs. autoantigen-reactive T cells that contribute to autoimmune toxicities.

[0006] Six-Transmembrane Epithelial Antigen of the Prostate 1 (STEAP1 ) is a cell surface antigen that is highly expressed in several carcinomas (e.g., prostate, breast, and bladder cancer). Carcinoembryonic antigen-related cell adhesion molecule 5 (CEACAM5) is a cell surface glycoprotein, and member of the carcinoembryonic (CEA) antigen family. CEACAM5 is overexpressed in numerous tumor types including gastrointestinal, breast, and lung. Since these antigens are overexpressed on a variety of tumors, STEAP1 and CEACAM5 are potential candidates for targeted cancer therapeutic development.

[0007] While immunotherapies targeting STEAP1 and CEACAM5 have been tried, there still remains a need for novel immune response enhancing compositions for the treatment of STEAP1 -associated and CEACAM5-associated cancers.

### SUMMARY

[0008] Provided herein are novel anti-CD28 x anti-STEAP1 and anti-CD28 x anti-CEACAM5 antibodies and methods of using such antibodies for the treatment of related cancers (e.g., STEAP1 or CEACAM5-associated cancers). Subject anti-CD28 x anti-STEAP1 antibodies are capable of agonistically binding to CD28 costimulatory molecules on T cells and STEAP1 on tumor cells. Subject anti-CD28 x anti-CEACAM5 antibodies are capable of agonistically binding to CD28 costimulatory molecules on T cells and CEACAM5 on tumor cells. Thus, such antibodies selectively enhance anti-tumor activity at tumor sites while minimizing peripheral toxicity. The subject antibodies provided herein are particularly useful in combination with other anti-cancer therapies, including, for example, bispecific antibodies for the treatment of STEAP1 - and CEACAM5-associated cancers.

[0009] In a first aspect, provided herein is an anti-CD28 x anti-STEAP1 heterodimeric antibody that comprises a) a first monomer; b) a second monomer; and c) a light chain. The first monomer comprises: i) a single chain variable fragment (scFv); and ii) a first Fc domain, wherein the scFv is covalently attached to the N-terminus of the first Fc domain using a domain linker. The second monomer comprises, from N-terminal to C-terminal, a VH1-CH1-hinge-CH2-CH3, wherein VHT is a first variable heavy domain and CH2-CH3 is a second Fc domain. The light chain comprises, from N-terminal to C-terminal, VL1-CL, wherein VL1 is a first variable light domain and CL is a constant light domain. The scFv comprises a second VH domain (VH2), a scFv linker, and a second variable light domain (VL2). The VHT and the VLT together form a first antigen binding domain (ABD) and the VH2 and the VL2 together form a second ABD. Further, one of the first ABD and the second ABD is a CD28 binding domain and the other of the first ABD and second ABD is Six Transmembrane Epithelial Antigen of Prostate 1 (STEAP1 ) binding domain.

[0010] In some embodiments, the scFv comprises, from N-terminal to C-terminal, VH2-scFv linker-VL2. In some embodiments, the scFv comprises, from N-terminal to C-terminal, VL2-scFv linker-VH2.

[0011] In exemplary embodiments, the first ABD is the STEAP1 binding domain and the second ABD is the CD28 binding domain. In some embodiments, VH1 and VL1 are selected from one of the following: a) a VH and VL of any of the STEAP1 binding domains from FIG. 22 or 39 or a variant thereof; or b) a VH from FIG. 31 and a VL from FIG. 32 or a variant thereof. In some embodiments, VH2 and VL2 are selected from one of the following: 1) a VH and VL of any of the CD28 binding domains from FIGS. 15, 18, and 21 or a variant thereof; or 2) (i) a VH from FIG. 15 or 16 or a variant thereof; and (ii) a VL from FIGS. 15, 17 or 82 or a variant thereof.

[0012] In some embodiments, the first Fc domain and second Fc domain are each variant Fc domains.

[0013] In some embodiments, the first and second Fc domains comprise a set of heterodimerization skew variants selected from the following heterodimerization variants: S364K/E357Q: L368D/K370S; S364K: L368D/K370S; S364K: L368E/K370S; D401K: T411E/K360E/Q362E; and T366W: T366S/L368A/Y407V, wherein numbering is according to EU numbering. In some embodiments, the first and second Fc domains comprise heterodimerization skew variants S364K/E357Q: L368D/K370S, wherein numbering is according to EU numbering.

[0014] In certain embodiments, the first and second Fc domains each comprise one or more ablation variants. In exemplary embodiments, the one or more ablation variants comprise E233P/L234V/L235A/G236del/S267K, wherein numbering is according to EU numbering.

[0015] In some embodiments, the one of the first or second monomer further comprises one or more pI variants. In some embodiments, the CH1-hinge-CH2-CH3 of the second monomer comprises pI variants N208D/Q295E/N384D/Q418E/N421D, wherein numbering is according to EU numbering.

[0016] In some embodiments, the CH1-hinge-CH2-CH3 of the second monomer comprises amino acid variants E233P/L234V/L235A/G236del/S267K/L368D/K370S/N208D/Q295E/N384D/Q418E/N421 D and the first Fc domain comprises amino acid variants E233P/L234V/L235A/G236del/S267K/S364K/E357Q, wherein numbering is according to EU numbering. In exemplary embodiments, the first and second variant Fc domains each further comprise amino acid variants 428L/434S.

[0017] In some embodiments, the scFv linker is GKPGSGKPGSGKPGSGKPGS (SEQ ID NO: 24).

[0018] In another aspect, provided herein is an anti-CD28 x anti-STEAP1 heterodimeric antibody that comprises a) a first monomer; b) a second monomer; c) a first light chain; and d) a second light chain. The first monomer comprises, from N-terminal to C-terminal, VH1-CH1-first domain linker-scFv-second domain linker-CH2-CH3, wherein VH1 is a first variable heavy domain, and CH2-CH3 is a first Fc domain. The second monomer comprises, from N-terminal to C-terminal, a VH1-CHT-hinge-CH2-CH3, wherein CH2-CH3 is a second Fc domain. The first light chain comprises, from N-terminal to C-terminal, VL1-CL, wherein VL1 is a first variable light domain and CL is a constant light domain. The second light chain comprises, from N-terminal to C-terminal, VL1-CL, wherein VL1 is a first variable light domain and CL is a constant light domain. The scFv comprises a second VH domain (VH2), a scFv linker, and a second variable light domain (VL2). The VH1 of the first monomer and the VL1 of the first light chain and the VH1 of the second monomer and the VL1 of the second light chain each form a first antigen binding domain (ABD), and the VH2 and the VL2 form a second ABD. Further, the first ABDs are STEAP1 binding domains and the second ABD is a CD28 binding domain, or the first ABDs are CD28 binding domains and the second ABD is a STEAP1 binding domain.

[0019] In some embodiments, the scFv comprises, from N-terminal to C-terminal, VH2-scFv linker-VL2. In some embodiments, the scFv comprises, from N-terminal to C-terminal, VL2-scFv linker-VH2.

[0020] In exemplary embodiments, the first ABDs are the STEAP1 binding domains and the second ABD is the CD28 binding domain. In some embodiments, VH1 and VL1 are selected from one of the following: a) a VH and VL of any of the STEAP1 binding domains from FIG. 22 or 39 or a variant thereof; or b) a VH from FIG. 31 and a VL from FIG. 32, or a variant thereof. In some embodiments, VH2 and VL2 are selected from one of the following: 1) a VH and VL of any of the CD28 binding domains from FIGS. 15, 18, and 21 or a variant thereof; or 2) (i) a VH from FIGS. 15 or 16 or a variant thereof; and (ii) a VL from FIGS. 15, 17 or 82 or a variant thereof.

[0021] In some embodiments, the first Fc domain and second Fc domain are each variant Fc domains.

[0022] In some embodiments, the first and second Fc domains comprise a set of heterodimerization skew variants selected from the following heterodimerization variants: S364K/E357Q: L368D/K370S; S364K: L368D/K370S; S364K: L368E/K370S; D401K: T411E/K360E/Q362E; and T366W: T366S/L368A/Y407V, wherein numbering is according to EU numbering. In some embodiments, the first and second Fe domains comprise heterodimerization skew variants S364K/E357Q: L368D/K370S, wherein numbering is according to EU numbering

[0023] In certain embodiments, the first and second Fc domains each comprise one or more ablation variants. In exemplary embodiments, the one or more ablation variants comprise E233P/L234V/L235A/G236del/S267K, wherein numbering is according to EU numbering.

[0024] In some embodiments, the one of the first or second monomer further comprises one or more pI variants. In some embodiments, the CH1-hinge-CH2-CH3 of the second monomer comprises pI variants N208D/Q295E/N384D/Q418E/N421D, wherein numbering is according to EU numbering.

[0025] In some embodiments, the CH1-hinge-CH2-CH3 of the second monomer comprises amino acid variants E233P/L234V/L235A/G236del/S267K/L368D/K370S/N208D/Q295E/N384D/Q418E/N421 D and the first Fc domain comprises amino acid variants E233P/L234V/L235A/G236del/S267K/S364K/E357Q, wherein numbering is according to EU numbering. In exemplary embodiments, the first and second variant Fc domains each further comprise amino acid variants 428L/434S.

[0026] In some embodiments, the scFv linker is GKPGSGKPGSGKPGSGKPGS (SEQ ID NO: 24).

[0027] In another aspect, provided herein is an anti-CD28 x anti-STEAP1 heterodimeric antibody that comprises a) a first monomer; b) a second monomer c) a first light chain; and d) a second light chain. The first monomer comprises, from N-terminal to C-terminal, VH1-CH1-hinge-CH2-CH3-domain linker-scFv, wherein VH1 is a first variable heavy domain, and CH2-CH3 is a first Fc domain. The second monomer comprises, from N-terminal to C-terminal, a VH1-CHT-hinge-CH2-CH3, wherein VH1 is a first variable heavy domain and CH2-CH3 is a second Fc domain. The first light chain comprises, from N-terminal to C-terminal, VL1-CL, wherein VL1 is a first variable light domain and CL is a constant light domain. The second light chain comprises, from N-terminal to C-terminal, VL1-CL, wherein VL1 is a first variable light domain and CL is a constant light domain. The scFv comprises a second VH domain (VH2), a scFv linker, and a second variable light domain (VL2). The VH1 of the first monomer and the VL1 of the first light chain and the VH1 of the second monomer and the VL1 of the second light chain each form a first antigen binding domain (ABD), and the VH2 and the VL2 form a second ABD. Further, the first ABDs are STEAP1 binding domains and the second ABD is a CD28 binding domain, or the first ABDs are CD28 binding domains and the second ABD is a STEAP1 binding domain.

[0028] In some embodiments, the scFv comprises, from N-terminal to C-terminal, VH2-scFv linker-VL2. In some embodiments, the scFv comprises, from N-terminal to C-terminal, VL2-scFv linker-VH2.

[0029] In exemplary embodiments, the first ABDs are the STEAP1 binding domains and the second ABD is the CD28 binding domain. In some embodiments, VH1 and VL1 are selected from one of the following: a) a VH and VL of any of the STEAP1 binding domains from FIG. 22 or 39 or a variant thereof; or b) a VH from FIG. 31 and a VL from FIG. 32, or a variant thereof. In some embodiments, VH2 and VL2 are selected from one of the following: 1) a VH and VL of any of the CD28 binding domains from FIGS. 15, 18, and 21 or a variant thereof; or 2) (i) a VH from FIG. 15 or 16 or a variant thereof; and (ii) a VL from FIGS. 15, 17 or 82 or a variant thereof.

[0030] In some embodiments, the first Fc domain and second Fc domain are each variant Fc domains.

[0031] In some embodiments, the first and second Fc domains comprise a set of heterodimerization skew variants selected from the following heterodimerization variants: S364K/E357Q: L368D/K370S; S364K: L368D/K370S; S364K: L368E/K370S; D401K: T411E/K360E/Q362E; and T366W: T366S/L368A/Y407V, wherein numbering is according to EU numbering. In some embodiments, the first and second Fc domains comprise heterodimerization skew variants S364K/E357Q: L368D/K370S, wherein numbering is according to EU numbering.

[0032] In certain embodiments, the first and second Fc domains each comprise one or more ablation variants. In exemplary embodiments, the one or more ablation variants comprise E233P/L234V/L235A/G236del/S267K, wherein numbering is according to EU numbering.

[0033] In some embodiments, the one of the first or second monomer further comprises one or more pI variants. In some embodiments, the CH1-hinge-CH2-CH3 of the second monomer comprises pI variants N208D/Q295E/N384D/Q418E/N421D, wherein numbering is according to EU numbering.

[0034] In some embodiments, the CH1-hinge-CH2-CH3 of the second monomer comprises amino acid variants E233P/L234V/L235A/G236del/S267K/L368D/K370S/N208D/Q295E/N384D/Q418E/N421 D and the first Fc domain comprises amino acid variants E233P/L234V/L235A/G236del/S267K/S364K/E357Q, wherein numbering is according to EU numbering. In exemplary embodiments, the first and second variant Fe domains each further comprise amino acid variants 428L/434S.

[0035] In some embodiments, the scFv linker is GKPGSGKPGSGKPGSGKPGS (SEQ ID NO: 24).

[0036] In another aspect, provided herein is an anti-CD28 x anti-STEAP1 heterodimeric antibody that comprises a) a first monomer; b) a second monomer; c) a first light chain; and d) a second light chain. The first monomer comprises, from N-terminal to C-terminal, a VH1-CH1-domain linker-VH1-CHT-hinge-CH2-CH3, wherein each of the VHTs is a first variable heavy domain, and CH2-CH3 is a first Fc domain. The second monomer comprises, from N-terminal to C-terminal, an scFv-domain linker-CH2-CH3, wherein VH1 is a first variable heavy domain and CH2-CH3 is a second Fc domain. The first light chain comprises, from N-terminal to C-terminal, VL1-CL, wherein VL1 is a first variable light domain and CL is a constant light domain. The second light chain comprises, from N-terminal to C-terminal, VL1-CL, wherein VL1 is a first variable light domain and CL is a constant light domain. The scFv comprises a second VH domain (VH2), a scFv linker, and a second variable light domain (VL2). The VH1 of the first monomer and the VL1 of the first light chain and the VH1 of the second monomer and the VL1 of the second light chain each form a first antigen binding domain (ABD), and the VH2 and the VL2 form a second ABD. Further, the first ABDs are STEAP1 binding domains and the second ABD is a CD28 binding domain, or the first ABDs are CD28 binding domains and the second ABD is a STEAP1 binding domain. In some embodiments, the scFv comprises, from N-terminal to C-terminal, VH2-scFv linker-VL2. In some embodiments, the scFv comprises, from N-terminal to C-terminal, VL2-scFv linker-VH2.

[0037] In exemplary embodiments, the first ABDs are the STEAP1 binding domains and the second ABD is the CD28 binding domain. In some embodiments, VH1 and VL1 are selected from one of the following: a) a VH and VL of any of the STEAP1 binding domains from FIG. 22 or 39 or a variant thereof; or b) a VH from FIG. 31 and a VL from FIG. 32, or a variant thereof. In some embodiments, VH2 and VL2 are selected from one of the following: 1) a VH and VL of any of the CD28 binding domains from FIGS. 15, 18, and 21 or a variant thereof; or 2) (i) a VH from FIG. 15 or 16 or a variant thereof; and (ii) a VL from FIGS. 15, 17 or 82 or a variant thereof.

[0038] In some embodiments, the first Fc domain and second Fc domain are each variant Fc domains.

[0039] In some embodiments, the first and second Fe domains comprise a set of heterodimerization skew variants selected from the following heterodimerization variants: S364K/E357Q: L368D/K370S; S364K: L368D/K370S; S364K: L368E/K370S; D401K: T411E/K360E/Q362E; and T366W: T366S/L368A/Y407V, wherein numbering is according to EU numbering. In some embodiments, the first and second Fc domains comprise heterodimerization skew variants S364K/E357Q: L368D/K370S, wherein numbering is according to EU numbering.

[0040] In certain embodiments, the first and second Fc domains each comprise one or more ablation variants. In exemplary embodiments, the one or more ablation variants comprise E233P/L234V/L235A/G236del/S267K, wherein numbering is according to EU numbering.

[0041] In some embodiments, the one of the first or second monomer further comprises one or more pI variants. In some embodiments, the CH1-hinge-CH2-CH3 of the second monomer comprises pI variants N208D/Q295E/N384D/Q418E/N421D, wherein numbering is according to EU numbering.

[0042] In some embodiments, the CH1-hinge-CH2-CH3 of the second monomer comprises amino acid variants E233P/L234V/L235A/G236del/S267K/L368D/K370S/N208D/Q295E/N384D/Q418E/N421 D, the first Fc domain comprises amino acid variants E233P/L234V/L235A/G236del/S267K/S364K/E357Q, wherein numbering is according to EU numbering. In exemplary embodiments, the first and second variant Fc domains each further comprise amino acid variants 428L/434S.

[0043] In some embodiments, the scFv linker is GKPGSGKPGSGKPGSGKPGS (SEQ ID NO: 24).

[0044] In another aspect, provided herein is a bispecific antibody that comprises: a) a STEAP1 binding domain comprising i) a first variable heavy domain (VH1), and ii) a first variable light domain (VL1); and b) an anti-CD28 binding domain comprising i) a second variable heavy domain (VH2), and ii) a second variable light domain (VL2). In some embodiments, VH1 and VL1 are selected from one of the following: a) a VH and VL of any of the STEAP1 binding domains from FIG. 22 or 39 or a variant thereof; or b) a VH from FIG. 31 and a VL from FIG. 32, or a variant thereof. In some embodiments, VH2 and VL2 are selected from one of the following: 1) a VH and VL of any of the CD28 binding domains from FIGS. 15, 18, and 21 or a variant thereof; or 2) (i) a VH from FIG. 15 or 16 or a variant thereof; and (ii) a VL from FIGS. 15, 17 or 82 or a variant thereof.

[0045] In some embodiments of the bispecific antibodies, the first Fc domain and second Fc domain are each variant Fc domains.

[0046] In some embodiments of the bispecific antibodies, the first and second Fc domains comprise a set of heterodimerization skew variants selected from the following heterodimerization variants: S364K/E357Q: L368D/K370S; S364K: L368D/K370S; S364K : L368E/K370S; D401K: T411E/K360E/Q362E; and T366W: T366S/L368A/Y407V, wherein numbering is according to EU numbering. In some embodiments, the first and second Fc domains comprise heterodimerization skew variants S364K/E357Q: L368D/K370S, wherein numbering is according to EU numbering.

[0047] In certain embodiments, the first and second Fc domains each comprise one or more ablation variants. In exemplary embodiments, the one or more ablation variants comprise E233P/L234V/L235A/G236del/S267K, wherein numbering is according to EU numbering.

[0048] In some embodiments, the one of the first or second monomer further comprises one or more pI variants. In some embodiments, the pI variants N208D/Q295E/N384D/Q418E/N421D, wherein numbering is according to EU numbering.

[0049] Also provided herein are nucleic acid compositions comprising nucleic acids encoding the antibodies described herein, expression vector compositions that include such nucleic acids, host cells for making the antibodies that comprise the expression vector compositions, and methods of making the antibodies.

[0050] In another aspect, provided herein is a method of treating a STEAP1 -associated cancer in a patient in need thereof, comprising administering to the patient an anti-CD28 x anti-STEAP1 bispecific antibody as described herein.

[0051] In another aspect, provided herein is a method of treating a STEAP1 -associated cancer in a patient in need thereof, comprising administering to the patient an anti-CD28 x anti-STEAP1 bispecific antibody as described herein; and an anti-CD3 x anti-STEAP1 bispecific antibody.

[0052] In another aspect, provided herein are compositions comprising a STEAP1 antigen binding domain (ABD). In some embodiments, the STEAP1 includes a) a variable heavy domain having the vhCDR1-3 of any of the STEAP1 binding domain variable heavy domains in FIG. 22 or FIG. 31; and b) a variable light domain having the vlCDR1-3 of any of the STEAP1 binding domain variable light domains in FIG. 22 or FIG. 32.

[0053] In some embodiments, the STEAP1 ABD includes a) a variable heavy domain having at least 85% sequence identity to a STEAP1 binding domain variable heavy domain in FIG. 22 or FIG. 31; and b) a variable light domain having at least 85% sequence identity to a STEAP1 binding domain variable light domain in FIG. 22 or FIG. 32. In some embodiments, the variable heavy domain has at least 90% sequence identity to a STEAP1 binding domain variable heavy domain in FIG. 22 or FIG. 31; and the variable light domain has at least 90% sequence identity to a STEAP1 binding domain variable light domain in FIG. 22 or FIG. 32. In some embodiments, the variable heavy domain has at least 95% sequence identity to a STEAP1 binding domain variable heavy domain in FIG. 22 or FIG. 31; and the variable light domain has at least 95% sequence identity to a STEAP1 binding domain variable light domain in FIG. 22 or FIG. 32. In some embodiments, the variable heavy domain has at least 99% sequence identity to a STEAP1 binding domain variable heavy domain in FIG. 22 or FIG. 31; and the variable light domain has at least 99% sequence identity to a STEAP1 binding domain variable light domain in FIG. 22 or FIG. 32. In some embodiments, the variable heavy domain has an amino acid sequence of a STEAP1 binding domain variable heavy domain in FIG. 22 or FIG. 31; and the variable light domain has an amino acid sequence of a STEAP1 binding domain variable light domain in FIG. 22 or FIG. 32.

[0054] In some embodiments, the STEAP1 ABD comprises a STEAP1 binding domain variable heavy domain and a STEAP1 binding domain variable light domain selected from the following: H1 and L1, H1.1 and L1, H1.2 and L1, H1.3 and L1, H1.4 and L1, H1.5 and L1, H1.6 and L1, H1.7 and L1, H1.8 and L1, H1.9 and L1, H1.10 and L1, H1.I1 and L1, H1.12 and L1, H1.13 and L1, H1.14 and L1, H1.15 and L1, H1.16 and L1, H1.17 and L1, H1.18 and L1, H1.19 and L1, H1.20 and L1, H1.21 and L1, H1.22 and L1, H1.23 and L1, H1.24 and L1, H1.25 and L1, H1.26 and L1, H1.27 and L1, H1.28 and L1, H1.29 and L1, H1.30 and L1, H1.31 and L1, H1.32 and L1, H1.33 and L1, H1.34 and L1, H1.35 and L1, H1.36 and L1, H1.37 and L1, H1.38 and L1, H1 and L1.1, H1 and L1.2, H1 and L1.3, H0 and L0, H1.21 and L1.3, H1.34 and L1.3, H1.39 and L1, H1.40 and L1, H1.4I and L1, H1.42 and L1, H1.43 and L1, H1.44 and L1, H1.45 and L1, H1.46 and L1, H1.47 and L1, H1.48 and L1, H1.49 and L1, H1.50 and L1, H1.51 and L1, H1.52 and L1, H1.53 and L1, H1.54 and L1, H1.55 and L1, H1.56 and L1, H1.57 and L1, H1.58 and L1, H1.59 and L1, H1.60 and L1, H1.61 and L1, H1.62 and L1, H1.63 and L1, H1.64 and L1, H1.65 and L1, H1.66 and L1, H1.67 and L1, H1.68 and L1, H1.69 and L1, H1.70 and L1, H1.71 and L1, H1.72 and L1, H1.73 and L1, H1.74 and L1, H1.75 and L1, H1.76 and L1, H1.77 and L1, H1.78 and L1, H1.79 and L1, H1.80 and L1, H1.81 and L1, H1.82 and L1, H1.83 and L1, H1.84 and L1, H1.85 and L1, H1.86 and L1, H1.87 and L1, H1.88, and L1, H1.89 and L1, H1.90 and L1, H1.91 and L1, H1.92 and L1, H1.93 and L1, H1.94 and L1, H1.95 and L1, H1.96 and L1, H1.97 and L1, H1.98 and L1, H1.99 and L1, H1.100 and L1, H1.101 and L1, H1.102 and L1, H1.103 and L1, H1.104 and L1, H1.105 and L1, H1.106 and L1, H1.107 and L1, H1.108 and L1, H1.109 and L1, H1.110 and L1, H1.111 and L1, H1.112 and L1, H1.113 and L1, H1.114 and L1, H1.115 and L1, H1.116 and L1, H1.117 and L1, H1.118 and L1, H1.119 and L1, H1.120 and L1, H1.121 and L1, H1.122 and L1, H1.123 and L1, H1.124 and L1, H1.125 and L1, H1.126 and L1, H1.127 and L1, H1.128 and L1, H1.129 and L1, H1.130 and L1, H1.131 and L1, H1.132 and L1, H1.133 and L1, H1.134 and L1, H1.135 and L1, H1.136 and L1, H1.137 and L1, H1.138 and L1, H1.139 and L1, H1.140 and L1, H1.141 and L1, H1.142 and L1, H1.143 and L1, H1.144 and L1, H1.145 and L1, H1.146 and L1, H1.147 and L1, H1.148 and L1, H1.149 and L1, H1.150 and L1, H1.151 and L1, H1.152 and L1, H1.153 and L1, H1.154 and L1, H1.155 and L1, H1.156 and L1, H1.157 and L1, H1.158 and L1, H1.159 and L1, H1.160 and L1, H1.161 and L1, H1.162 and L1, H1.163 and L1, H1.164 and L1, H1.165 and L1, H1.166 and L1, H1.167 and L1, H1.168 and L1, H1.169 and L1, H1.170 and L1, H1.171 and L1, H1.172 and L1, H1.173 and L1, H1.174 and L1, H1.175 and L1, H1.176 and L1, H1.177 and L1, H1.178 and L1, H1.179 and L1, H1.180 and L1, H1.181 and L1, H1.182 and L1, H1.183 and L1, H1.184 and L1, H1.185 and L1, H1.186 and L1, H1.187 and L1, H1.188 and L1, H1.189 and L1, H1 and L1.4, H1 and L1.5, H1 and L1.6, H1 and L1.7, H1 and L1.8, H1 and L1.9, H1 and L1.10, H1 and L1.11, H1 and L1.12, H1 and L1.13, H1 and L1.14, H1 and L1.15, H1 and L1.16, H1 and L1.17, H1 and L1.18, H1 and L1.19, H1 and L1.20, H1 and L1.21, H1 and L1.22, H1 and L1.23, H1 and L1.24, H1 and L1.25, H1 and L1.26, H1 and L1.27, H1 and L1.28, H1 and L1.29, H1 and L1.30, H1 and L1.31, H1 and L1.32, H1 and L1.33, H1 and L1.34, H1 and L1.35, H1 and L1.36, H1 and L1.37, H1 and L1.38, H1 and L1.39, H1 and L1.40, H1 and L1.41, H1 and L1.42, H1 and L1.43, H1 and L1.44, H1 and L1.45, H1 and L1.46, H1 and L1.47, H1 and L1.48, H1 and L1.49, H1 and L1.50, H1 and L1.51, H1 and L1.52, H1 and L1.53, H1 and L1.54, H1 and L1.55, H1 and L1.56, H1 and L1.57, H1 and L1.58, H1 and L1.59, H1 and L1.60, H1 and L1.61, H1 and L1.62, H1 and L1.63, H1 and L1.64, H1 and L1.65, H1 and L1.66, H1 and L1.67, H1 and L1.68, H1 and L1.69, H1 and L1.70, H1 and L1.71, H1 and L1.72, H1 and L1.73, H1 and L1.74, H1 and L1.75, H1 and L1.76, H1 and L1.77, H1 and L1.78, H1 and L1.79, H1 and L1.80, H1 and L1.81, H1 and L1.82, H1 and L1.83, H1 and L1.84, H1 and L1.85, H1.42 and L1.47, H1.42 and L1.56, H1.190 and L1.3, H1.191 and L1.3, H1.192 and L1.3, H1.195 and L1.3, H1.196 and L1.3, H1.197 and L1.3, H1.198 and L1.3, H1.199 and L1.3, H1.200 and L1.3, H1.201 and L1.3, H1.202 and L1.3, H1.203 and L1.3, H1.204 and L1.3, H1.205 and L1.3, H1.206 and L1.3, H1.207 and L1.3, H1.208 and L1.3, H1.209 and L1.3, H1.210 and L1.3, H1.211 and L1.3, H1.212 and L1.3, H1.213 and L1.3, H1.214 and L1.3, H1.215 and L1.3, H1.216 and L1.3, H1.217 and L1.3, H1.218 and L1.3, H1.219 and L1.3, H1.220 and L1.3, H1.221 and L1.3, H1.222 and L1.3, H1.223 and L1.3, H1.224 and L1.3, H1.225 and L1.3, H1.226 and L1.3, H1.227 and L1.3, H1.228 and L1.3, H1.21 and L1.92, H1.21 and L1.93, H1.21 and L1.94, H1.21 and L1.95, H1.21 and L1.96, H1.21 and L1.97, H1.21 and L1.98, H1.21 and L1.99, H1.21 and L1.100, H1.21 and L1.101, H1.21 and L1.102, H1.21 and L1.103, H1.21 and L1.104, H1.21 and L1.105, H1.21 and L1.106, H1.21 and L1.107, H1.21 and L1.108, H1.21 and L1.109, H1.21 and L1.110, H1.21 and L1.111, H1.21 and L1.112, H1.21 and L1.113, H1.21 and L1.114, H1.21 and L1.115, H1.21 and L1.116, H1.21 and L1.117, H1.21 and L1.118, H1.21 and L1.119, H1.195 and L1.92, H1.195 and L1.94, H1.195 and L1.95, H1.195 and L1.104, H1.195 and L1.105, H1.195 and L1.109, H1.196 and L1.92, H1.196 and L1.94, H1.196 and L1.95, H1.196 and L1.104, H1.196 and L1.105, H1.196 and L1.109, H1.205 and L1.92, H1.205 and L1.94, H1.205 and L1.95, H1.205 and L1.104, H1.205 and L1.105, H1.205 and L1.109, H1.193 and L1.91, H1.194 and L1.86, H1.194 and L1.87, H1.194 and L1.88, H1.194 and L1.89, or H1.194 and L1.90, or H1.2320 and L1.100, or H1.230 and L1.115 (FIGS. 22, 31, 32 and 39).

[0055] In one aspect, provided herein is an anti-CD28 x anti-CEACAM5 heterodimeric antibody that comprises a) a first monomer; b) a second monomer; and c) a light chain. The first monomer comprises: i) a single chain variable fragment (scFv); and ii) a first Fc domain, wherein the scFv is covalently attached to the N-terminus of the first Fc domain using a domain linker. The second monomer comprises, from N-terminal to C-terminal, a VH1-CH1-hinge-CH2-CH3, wherein VH1 is a first variable heavy domain and CH2-CH3 is a second Fc domain. The light chain comprises, from N-terminal to C-terminal, VL1-CL, wherein VL1 is a first variable light domain and CL is a constant light domain. The scFv comprises a second VH domain (VH2), a scFv linker, and a second variable light domain (VL2). The VH1 and the VL1 together form a first antigen binding domain (ABD) and the VH2 and the VL2 together form a second ABD. Further, one of the first ABD and second ABD is a CD28 binding domain and the other of the first ABD and second ABD is a carcinoembryonic antigen-related cell adhesion molecule 5 (CEACAM5) binding domain.

[0056] In some embodiments, the scFv comprises, from N-terminal to C-terminal, VH2-scFv linker-VL2. In some embodiments, the scFv comprises, from N-terminal to C-terminal, VL2-scFv linker-VH2.

[0057] In exemplary embodiments, the first ABDs is the CEACAM5 binding domain and the second ABD is the CD28 binding domain. In some embodiments, VH1 and VL1 are a selected from the following VH and VL of any of the CEACAM5 binding domains from FIG. 41 and FIG. 45 or a variant thereof. In some embodiments, VH2 and VL2 are selected from one of the following: 1) a VH and VL of any of the CD28 binding domains from FIGS. 15, 18, 21 and 65 or a variant thereof; or 2) (i) a VH from FIG. 15 or 16 or a variant thereof; and (ii) a VL from FIGS. 15, 17 or 82 or a variant thereof.

[0058] In some embodiments, the first Fc domain and second Fc domain are each variant Fc domains.

[0059] In some embodiments, the first and second Fc domains comprise a set of heterodimerization skew variants selected from the following heterodimerization variants: S364K/E357Q: L368D/K370S; S364K: L368D/K370S; S364K: L368E/K370S; D401K: T411E/K360E/Q362E; and T366W: T366S/L368A/Y407V, wherein numbering is according to EU numbering. In some embodiments, the first and second Fc domains comprise heterodimerization skew variants S364K/E357Q: L368D/K370S, wherein numbering is according to EU numbering

[0060] In certain embodiments, the first and second Fc domains each comprise one or more ablation variants. In exemplary embodiments, the one or more ablation variants comprise E233P/L234V/L235A/G236del/S267K, wherein numbering is according to EU numbering.

[0061] In some embodiments, the one of the first or second monomer further comprises one or more pI variants. In some embodiments, the CH1-hinge-CH2-CH3 of the second monomer comprises pI variants N208D/Q295E/N384D/Q418E/N421D, wherein numbering is according to EU numbering.

[0062] In some embodiments, the CH1-hinge-CH2-CH3 of the second monomer comprises amino acid variants E233P/L234V/L235A/G236del/S267K/L368D/K370S/N208D/Q295E/N384D/Q418E/N421 D, the first Fc domain comprises amino acid variants E233P/L234V/L235A/G236del/S267K/S364K/E357Q, wherein numbering is according to EU numbering. In exemplary embodiments, the first and second variant Fc domains each further comprise amino acid variants 428L/434S.

[0063] In some embodiments, the scFv linker is GKPGSGKPGSGKPGSGKPGS (SEQ ID NO: 24).

[0064] In another aspect, provided herein is an anti-CD28 x anti-CEACAM5 heterodimeric antibody that comprises a) a first monomer; b) a second monomer; c) a first light chain; and d) a second light chain. The first monomer comprises, from N-terminal to C-terminal, VH1-CH1-first domain linker-scFv-second domain linker-CH2-CH3, wherein VH1 is a first variable heavy domain, and CH2-CH3 is a first Fc domain. The second monomer comprises, from N-terminal to C-terminal, a VH1-CHT-hinge-CH2-CH3, wherein CH2-CH3 is a second Fc domain. The first light chain comprises, from N-terminal to C-terminal, VL1-CL, wherein VL1 is a first variable light domain and CL is a constant light domain. The second light chain comprises, from N-terminal to C-terminal, VL1-CL, wherein VL1 is a first variable light domain and CL is a constant light domain. The scFv comprises a second VH domain (VH2), a scFv linker, and a second variable light domain (VL2), wherein, the VH1 of the first monomer and the VL1 of the first light chain and the VH1 of the second monomer and the VL1 of the second light chain each form a first antigen binding domain (ABD), and the VH2 and the VL2 form a second ABD. Further, the first ABDs are carcinoembryonic antigen-related cell adhesion molecule 5 (CEACAM5) binding domains and the second ABD is a CD28 binding domain, or the first ABDs are CD28 binding domains and the second ABD is an CEACAM5 binding domain.

[0065] In some embodiments, the scFv comprises, from N-terminal to C-terminal, VH2-scFv linker-VL2. In some embodiments, the scFv comprises, from N-terminal to C-terminal, VL2-scFv linker-VH2.

[0066] In exemplary embodiments, the first ABDs are the CEACAM5 binding domains and the second ABD is the CD28 binding domain. In some embodiments, VH1 and VL1 are selected from the following: 1) a VH and VL of any of the CEACAM5 binding domains from FIG. 41 and FIG. 45 or a variant thereof. In some embodiments, VH2 and VL2 are selected from one of the following: 1) a VH and VL of any of the CD28 binding domains from FIGS. 15, 18, 21 and 65 or a variant thereof; or 2) (i) a VH from FIG. 15 or 16 or a variant thereof; and (ii) a VL from FIGS. 15, 17 or 82 or a variant thereof.

[0067] In some embodiments, the first Fc domain and second Fc domain are each variant Fc domains.

[0068] In some embodiments, the first and second Fc domains comprise a set of heterodimerization skew variants selected from the following heterodimerization variants: S364K/E357Q: L368D/K370S; S364K: L368D/K370S; S364K: L368E/K370S; D401K: T411E/K360E/Q362E; and T366W: T366S/L368A/Y407V, wherein numbering is according to EU numbering. In some embodiments, the first and second Fc domains comprise heterodimerization skew variants S364K/E357Q: L368D/K370S, wherein numbering is according to EU numbering

[0069] In certain embodiments, the first and second Fe domains each comprise one or more ablation variants. In exemplary embodiments, the one or more ablation variants comprise E233P/L234V/L235A/G236del/S267K, wherein numbering is according to EU numbering.

[0070] In some embodiments, the one of the first or second monomer further comprises one or more pI variants. In some embodiments, the CH1-hinge-CH2-CH3 of the second monomer comprises pI variants N208D/Q295E/N384D/Q418E/N421D, wherein numbering is according to EU numbering.

[0071] In some embodiments, the CH1-hinge-CH2-CH3 of the second monomer comprises amino acid variants E233P/L234V/L235A/G236del/S267K/L368D/K370S/N208D/Q295E/N384D/Q418E/N421 D, the first Fc domain comprises amino acid variants E233P/L234V/L235A/G236del/S267K/S364K/E357Q, wherein numbering is according to EU numbering. In exemplary embodiments, the first and second variant Fc domains each further comprise amino acid variants 428L/434S.

[0072] In some embodiments, the scFv linker is GKPGSGKPGSGKPGSGKPGS (SEQ ID NO: 24).

[0073] In another aspect, provided herein is an anti-CD28 x anti-CEACAM5 heterodimeric antibody that comprises a) a first monomer; b) a second monomer; and c) a first light chain; and d) a second light chain. The first monomer comprises, from N-terminal to C-terminal, VH1-CHT-hinge-CH2-CH3-domain linker-scFv, wherein VH1 is a first variable heavy domain, and CH2-CH3 is a first Fc domain. The second monomer comprises, from N-terminal to C-terminal, a VH1-CHT-hinge-CH2-CH3, wherein VH1 is a first variable heavy domain and CH2-CH3 is a second Fc domain. The first light chain comprises, from N-terminal to C-terminal, VL1-CL, wherein VL1 is a first variable light domain and CL is a constant light domain. The second light chain comprises, from N-terminal to C-terminal, VL1-CL, wherein VL1 is a first variable light domain and CL is a constant light domain. The scFv comprises a second VH domain (VH2), a scFv linker, and a second variable light domain (VL2), wherein the VH1 of the first monomer and the VL1 of the first light chain and the VH1 of the second monomer and the VL1 of the second light chain each form a first antigen binding domain (ABD), and the VH2 and the VL2 form a second ABD. Further, the first ABDs are carcinoembryonic antigen-related cell adhesion molecule 5 (CEACAM5) binding domains and the second ABD is a CD28 binding domain, or the first ABDs are CD28 binding domains and the second ABD is an CEACAM5 binding domain

[0074] In some embodiments, the scFv comprises, from N-terminal to C-terminal, VH2-scFv linker-VL2. In some embodiments, the scFv comprises, from N-terminal to C-terminal, VL2-scFv linker-VH2.

[0075] In exemplary embodiments, the first ABDs are the CEACAM5 binding domains and the second ABD is the CD28 binding domain. In some embodiments, VH1 and VL1 are selected from the following: 1) a VH and VL of any of the CEACAM5 binding domains from FIG. 41 and FIG. 45 or a variant thereof. In some embodiments, VH2 and VL2 are selected from one of the following: 1) a VH and VL of any of the CD28 binding domains from FIGS. 15, 18, 21 and 65 or a variant thereof; or 2) (i) a VH from FIG. 15 or 16 or a variant thereof; and (ii) a VL from FIGS. 15, 17 or 82 or a variant thereof.

[0076] In some embodiments, the first Fc domain and second Fc domain are each variant Fc domains.

[0077] In some embodiments, the first and second Fc domains comprise a set of heterodimerization skew variants selected from the following heterodimerization variants: S364K/E357Q: L368D/K370S; S364K: L368D/K370S; S364K: L368E/K370S; D401K: T411E/K360E/Q362E; and T366W: T366S/L368A/Y407V, wherein numbering is according to EU numbering. In some embodiments, the first and second Fc domains comprise heterodimerization skew variants S364K/E357Q: L368D/K370S, wherein numbering is according to EU numbering.

[0078] In certain embodiments, the first and second Fc domains each comprise one or more ablation variants. In exemplary embodiments, the one or more ablation variants comprise E233P/L234V/L235A/G236del/S267K, wherein numbering is according to EU numbering.

[0079] In some embodiments, the one of the first or second monomer further comprises one or more pI variants. In some embodiments, the CH1-hinge-CH2-CH3 of the second monomer comprises pI variants N208D/Q295E/N384D/Q418E/N421D, wherein numbering is according to EU numbering.

[0080] In some embodiments, the CH1-hinge-CH2-CH3 of the second monomer comprises amino acid variants E233P/L234V/L235A/G236del/S267K/L368D/K370S/N208D/Q295E/N384D/Q418E/N421 D, the first Fc domain comprises amino acid variants E233P/L234V/L235A/G236del/S267K/S364K/E357Q, wherein numbering is according to EU numbering. In exemplary embodiments, the first and second variant Fc domains each further comprise amino acid variants 428L/434S.

[0081] In some embodiments, the scFv linker is GKPGSGKPGSGKPGSGKPGS (SEQ ID NO: 24).

[0082] In another aspect, provided herein is a heterodimeric antibody that comprises a) a first monomer, b) a second monomer, c) a first light chain, and d) a second light chain. The first monomer comprises, from N-terminal to C-terminal, a VH1-CH1-domain linker-VH1-CH1-hinge-CH2-CH3, wherein each of the VHls is a first variable heavy domain, and CH2-CH3 is a first Fc domain. The second monomer comprises, from N-terminal to C-terminal, an scFv-domain linker-CH2-CH3, wherein VH1 is a first variable heavy domain and CH2-CH3 is a second Fc domain. The first common light chain comprises, from N-terminal to C-terminal, VL1-CL, wherein VL1 is a first variable light domain and CL is a constant light domain. The second light chain comprising, from N-terminal to C-terminal, VL1-CL, wherein VL1 is a first variable light domain and CL is a constant light domain. The scFv comprises a second VH domain (VH2), a scFv linker, and a second variable light domain (VL2), wherein the VH1 of the first monomer and the VL1 of the first light chain and the VH1 of the second monomer and the VL1 of the second light chain each form a first antigen binding domain (ABD), and the VH2 and the VL2 form a second ABD. Further, the first ABDs are carcinoembryonic antigen-related cell adhesion molecule 5 (CEACAM5) binding domains and the second ABD is a CD28 binding domain, or the first ABDs are CD28 binding domains and the second ABD is an CEACAM5 binding domain.

[0083] In some embodiments, the scFv comprises, from N-terminal to C-terminal, VH2-scFv linker-VL2. In some embodiments, the scFv comprises, from N-terminal to C-terminal, VL2-scFv linker-VH2.

[0084] In exemplary embodiments, the first ABDs are the CEACAM5 binding domains and the second ABD is the CD28 binding domain. In some embodiments, VH1 and VL1 are selected from the following: 1) a VH and VL of any of the CEACAM5 binding domains from FIG. 41 and FIG. 45 or a variant thereof. In some embodiments, VH2 and VL2 are selected from one of the following: 1) a VH and VL of any of the CD28 binding domains from FIGS. 15, 18, 21 and 65 or a variant thereof; or 2) (i) a VH from FIG. 15 or 16 or a variant thereof; and (ii) a VL from FIGS. 15, 17 or 82 or a variant thereof.

[0085] In some embodiments, the first Fc domain and second Fc domain are each variant Fc domains.

[0086] In some embodiments, the first and second Fc domains comprise a set of heterodimerization skew variants selected from the following heterodimerization variants: S364K/E357Q: L368D/K370S; S364K: L368D/K370S; S364K: L368E/K370S; D401K: T411E/K360E/Q362E; and T366W: T366S/L368A/Y407V, wherein numbering is according to EU numbering. In some embodiments, the first and second Fe domains comprise heterodimerization skew variants S364K/E357Q: L368D/K370S, wherein numbering is according to EU numbering.

[0087] In certain embodiments, the first and second Fc domains each comprise one or more ablation variants. In exemplary embodiments, the one or more ablation variants comprise E233P/L234V/L235A/G236del/S267K, wherein numbering is according to EU numbering.

[0088] In some embodiments, the one of the first or second monomer further comprises one or more pI variants. In some embodiments, the CH1-hinge-CH2-CH3 of the second monomer comprises pI variants N208D/Q295E/N384D/Q418E/N421D, wherein numbering is according to EU numbering.

[0089] In some embodiments, the CH1-hinge-CH2-CH3 of the second monomer comprises amino acid variants E233P/L234V/L235A/G236del/S267K/L368D/K370S/N208D/Q295E/N384D/Q418E/N421 D, the first Fc domain comprises amino acid variants E233P/L234V/L235A/G236del/S267K/S364K/E357Q, wherein numbering is according to EU numbering. In exemplary embodiments, the first and second variant Fc domains each further comprise amino acid variants 428L/434S.

[0090] In some embodiments, the scFv linker is GKPGSGKPGSGKPGSGKPGS (SEQ ID NO: 24).

[0091] In another aspect, provided herein is a bispecific antibody that comprises: a) a CEACAM5 binding domain comprising i) a first variable heavy domain (VH1), and ii) a first variable light domain (VL1); and b) an anti-CD28 binding domain comprising i) a second variable heavy domain (VH2), and ii) a second variable light domain (VL2). In some embodiments, VH1 and VL1 are selected from the following: 1) a VH and VL of any of the CEACAM5 binding domains from FIG. 41 and FIG. 45 or a variant thereof. In some embodiments, VH2 and VL2 are selected from one of the following: 1) a VH and VL of any of the CD28 binding domains from FIGS. 15, 18, 21 and 65 or a variant thereof; or 2) (i) a VH from FIG. 15 or 16 or a variant thereof; and (ii) a VL from FIGS. 15, 17 or 82 or a variant thereof.

[0092] In some embodiments of the bispecific antibodies, the first Fc domain and second Fc domain are each variant Fc domains.

[0093] In some embodiments of the bispecific antibodies, the first and second Fc domains comprise a set of heterodimerization skew variants selected from the following heterodimerization variants: S364K/E357Q: L368D/K370S; S364K: L368D/K370S; S364K : L368E/K370S; D401K: T411E/K360E/Q362E; and T366W: T366S/L368A/Y407V, wherein numbering is according to EU numbering. In some embodiments, the first and second Fe domains comprise heterodimerization skew variants S364K/E357Q: L368D/K370S, wherein numbering is according to EU numbering.

[0094] In certain embodiments, the first and second Fc domains each comprise one or more ablation variants. In exemplary embodiments, the one or more ablation variants comprise E233P/L234V/L235A/G236del/S267K, wherein numbering is according to EU numbering.

[0095] In some embodiments, the one of the first or second monomer further comprises one or more pI variants. In some embodiments, the CH1-hinge-CH2-CH3 of the second monomer comprises pI variants N208D/Q295E/N384D/Q418E/N421D, wherein numbering is according to EU numbering.

[0096] Also provided herein are nucleic acid compositions comprising nucleic acids encoding the antibodies described herein, expression vector compositions that include such nucleic acids, host cells for making the antibodies that comprise the expression vector compositions, and methods of making the antibodies.

[0097] In another aspect, provided herein is a method of treating a CEACAM5-cancer in a patient in need thereof, comprising administering to the patient according an anti-CD28 x anti-CEACAM5 bispecific antibody as described herein.

[0098] In another aspect, provided herein is a method of treating a CEACAM5-associated cancer in a patient in need thereof, comprising administering to the patient an anti-CD28 x anti-CEACAM5 bispecific antibody as described herein; and an anti-CD3 x anti-CEACAM5 bispecific antibody.

[0099] In another aspect, provided herein is a CEACAM5 antigen binding domain composition that comprises a) a variable heavy domain; and b) a variable light domain. The variable heavy domain comprises the vhCDR1-3 of any of the CEACAM5 binding domain variable heavy domains in FIG. 45. The variable light domain comprises the vlCDR1-3 of any of the CEACAM5 binding domain variable light domains in FIG. 45. In another aspect, provided herein is a CEACAM5 antigen binding domain composition that comprises a) a variable heavy domain; and b) a variable light domain. The variable heavy domain comprises at least 85% sequence identity to a CEACAM5 binding domain variable heavy domain in FIG. 45. The variable light domain comprises at least 85% sequence identity to a CEACAM5 binding domain variable light domain in FIG. 45.

[0100] In some embodiments, the variable heavy domain has at least 90% sequence identity to a CEACAM5 binding domain variable heavy domain in FIG. 45; and the variable light domain has at least 90% sequence identity to a CEACAM5 binding domain variable light domain in FIG. 45.

[0101] In some embodiments, the variable heavy domain has at least 95% sequence identity to a CEACAM5 binding domain variable heavy domain in FIG. 45; and the variable light domain has at least 95% sequence identity to a CEACAM5 binding domain variable light domain in FIG. 45.

[0102] In some embodiments, the variable heavy domain has at least 99% sequence identity to a CEACAM5 binding domain variable heavy domain in FIG. 45; and the variable light domain has at least 99% sequence identity to a CEACAM5 binding domain variable light domain in FIG. 45.

[0103] In some embodiments, the variable heavy domain has an amino acid sequence of a CEACAM5 binding domain variable heavy domain in FIG. 45; and the variable light domain has an amino acid sequence of a CEACAM5 binding domain variable light domain in FIG. 45.

[0104] In another aspect, provided herein is a CD28 antigen binding domain composition that comprises a) a variable heavy domain; and b) a variable light domain. The variable heavy domain comprises the vhCDR1-3 of any of the CD28 binding domain variable heavy domains in FIG. 65. The variable light domain comprises the vlCDR1-3 of any of the CD28 binding domain variable light domains in FIG. 65.

[0105] In another aspect, provided herein is a CD28 antigen binding domain composition that comprises a) a variable heavy domain; and b) a variable light domain. The variable heavy domain comprises at least 85% sequence identity to a CD28 binding domain variable heavy domain in FIG. 65. The variable light domain comprises at least 85% sequence identity to a CD28 binding domain variable light domain in FIG. 65.

[0106] In some embodiments, the variable heavy domain has at least 90% sequence identity to a CD28 binding domain variable heavy domain in FIG. 65; and the variable light domain has at least 90% sequence identity to a CD28 binding domain variable light domain in FIG. 65.

[0107] In some embodiments, the variable heavy domain has at least 95% sequence identity to a CD28 binding domain variable heavy domain in FIG. 65; and the variable light domain has at least 95% sequence identity to a CD28 binding domain variable light domain in FIG. 65.

[0108] In some embodiments, the variable heavy domain has at least 99% sequence identity to a CD28 binding domain variable heavy domain in FIG. 65; and the variable light domain has at least 99% sequence identity to a CD28 binding domain variable light domain in FIG. 65.

[0109] In some embodiments, the variable heavy domain has an amino acid sequence of a CD28 binding domain variable heavy domain in FIG. 65; and the variable light domain has an amino acid sequence of a CD28 binding domain variable light domain in FIG. 65.

[0110] In some embodiments, the CD28 binding domain is selected from the following: IA7[CD28]_H1L1, IA7[CD28]_H1.1_L1, IA7[CD28]_H1_L1.71, IA7[CD28]_H1.1_L1.71, IA7[CD28]H1.14_L1, IA7[CD28]_H1.14_L1.71, CD28.3[CD28]_H0L0, hCD28.3[CD28]_H1L1, 5.11A1[CD28]_H0L0, TGN1412_H1L1, 341VL34[CD28]H1L1, 341VL36[CD28]_H1L1, 281VL4[CD28]_H1L1, HuTN228[CD28]_H1L1, PV1[CD28]H0L0, m9.3[CD28]_H0L0, hu9.3[CD28]_H1L1, 9G2[CD28]_H0L0, 9G2[CD28]_H1L1, 2F10A3.140[CD28]_H1L1, TN228[CD28]_H4L2, 1A7[CD28]_H1.1_L1 [S-S], IA7[CD28]_H1_L1.71 [S-S], IA7[CD28]_H1.1_L1.71 [S-S], IA7[CD28]_H1.14_L1 [S-S], IA7[CD28]_H1.14_L1.71 [S-S], IA7[CD28]_H1.129_L1.71 [S-S], 1A7[CD28]_H1.106_L1.71 [S-S], 1A7[CD28]_H1.129_L1 [S-S], and IA7[CD28]_H1.106_L1 [S-S]in FIG. 65.

### BRIEF DESCRIPTION OF THE DRAWINGS

[0111] Figures iA and 1B depict the sequences for human, mouse, and cynomolgus CD28. Such CD28 are useful for the development of cross-reactive CD28 antigen binding domains for ease of clinical development.

[0112] FIGS. 2A and 2B depict STEAP1 and CEACAM5 sequences. FIG. 2A depicts the sequences for human, mouse, and cynomolgus STEAP1 . Such STEAP1 s are useful for the development of cross-reactive STEAP1 antigen binding domains for ease of clinical development. FIG. 2B depicts the sequences for human, mouse, and cynomolgus CEACAM5. Such CEACAM5s are useful for the development of cross-reactive CEACAM5 antigen binding domains for ease of clinical development.

[0113] FIG. 3A-3F depict useful pairs of heterodimerization variant sets (including skew and pI variants). In FIG. 3F, there are variants for which there are no corresponding “monomer 2” variants. Such variants are pI variants that can be used alone on either monomer of a bispecific antibody (e.g., STEAP1 x CD28 bsAb or CEACAM5 x CD28 bsAb), or included, for example, on the non-scFv side of a format that utilizes an scFv as a component and an appropriate charged scFv linker can be used on the second monomer that utilizes an scFv as the CD28 binding domain. Suitable charged linkers are shown in FIG. 6. Heterodimer yield (%) and CH3 Tₘ (° C.) of preferred Fc heterodimerization variants were previously described (see, e.g., FIG. 8 of U.S. Patent Application No. 2019/0248898).

[0114] FIG. 4 depicts a list of isosteric variant antibody constant regions and their respective substitutions. pI_(−) indicates lower pI variants, while pI_(+) indicates higher pI variants. These variants can be optionally and independently combined with other variants, including heterodimerization variants, outlined herein.

[0115] FIG. 5 depict useful ablation variants that ablate FcγR binding (also referred to as “knockouts” or “KO” variants). In some embodiments, such ablation variants are included in the Fc domain of both monomers of the subject antibody described herein. In other embodiments, the ablation variants are only included on only one variant Fc domain.

[0116] FIG. 6 depicts a number of charged scFv linkers that find use in increasing or decreasing the pI of the subject heterodimeric bispecific antibodies that utilize one or more scFv as a component, as described herein (e.g., STEAP1 x CD28 and CEACAM5 x CD28 bsAbs). The (+H) positive linker finds particular use herein, particularly with anti-CD28 VL and VH sequences shown herein. A single prior art scFv linker with a single charge is referenced as “Whitlow,” from Whitlow et al., Protein Engineering 6(8):989-995 (1993). It should be noted that this linker was used for reducing aggregation and enhancing proteolytic stability in scFvs. Such charged scFv linkers can be used in any of the subject antibody formats disclosed herein that include scFvs (e.g., 1+1 Fab-scFv-Fc and 2+1 Fab2-scFv-Fc formats).

[0117] FIG. 7 depicts a number of exemplary domain linkers. In some embodiments, these linkers find use linking a single-chain Fv to an Fc chain. In some embodiments, these linkers may be combined in any orientation. For example, a GGGGS (SEQ ID NO: 36) linker may be combined with a “lower half hinge” linker at the N-terminus or at the C-terminus.

[0118] FIG. 8 shows a particularly useful bispecific antibody platform for the STEAP1 x CD28 and CEACAM5 x CD28 bsAb bsAbs of the invention. Although the platform is described in the context of the 1+1 Fab-scFv-Fc format, it can be adapted for use in other bispecific antibody formats.

[0119] FIGS. 9A-9D show the sequences of several useful heterodimeric STEAP1 x CD28 bsAb and CEACAM5 x CD28 bsAb backbones based on human IgG1, without the cytokine sequences. Heterodimeric Fc backbone 1 is based on human IgG1 (356E/358M allotype), and includes the L368D/K370S skew variants and the Q295E/N384D/Q418E/N421D pI variants on a first heterodimeric Fc chain, the S364K/E357Q skew variants on a second heterodimeric Fc chain, and the E233P/L234V/L235A/G236del/S267K ablation variants on both chains. Heterodimeric Fc backbone 2 is based on human IgG1 (356E/358M allotype), and includes the L368D/K370S skew variants and the Q295E/N384D/Q418E/N421D pI variants on a first heterodimeric Fc chain, the S364K skew variant on a second heterodimeric Fc chain, and the E233P/L234V/L235A/G236del/S267K ablation variants on both chains. Heterodimeric Fc backbone 3 is based on human IgG1 (356E/358M allotype), and includes the L368E/K370S skew variants and the Q295E/N384D/Q418E/N421D pI variants on a first heterodimeric Fc chain, the S364K skew variant on a second heterodimeric Fc chain, and the E233P/L234V/L235A/G236del/S267K ablation variants on both chains. Heterodimeric Fc backbone 4 is based on human IgG1 (356E/358M allotype), and includes the K360E/Q362E/T411E skew variants and the Q295E/N384D/Q418E/N421D pI variants on a first heterodimeric Fc chain, the D401K skew variant on a second heterodimeric Fc chain, and the E233P/L234V/L235A/G236del/S267K ablation variants on both chains. Heterodimeric Fc backbone 5 is based on human IgG1 (356D/358L allotype), and includes the L368D/K370S skew variants and the Q295E/N384D/Q418E/N421D pI variants on a first heterodimeric Fc chain, the S364K/E357Q skew variants on a second heterodimeric Fc chain, and the E233P/L234V/L235A/G236del/S267K ablation variants on both chains. Heterodimeric Fc backbone 6 is based on human IgG1 (356E/358M allotype), and includes the L368D/K370S skew variants and the Q295E/N384D/Q418E/N421D pI variants on a first heterodimeric Fc chain, the S364K/E357Q skew variants on a second heterodimeric Fc chain, and the E233P/L234V/L235A/G236del/S267K ablation variants and N297A variant that removes glycosylation on both chains. Heterodimeric Fc backbone 7 is based on human IgG1 (356E/358M allotype), and includes the L368D/K370S skew variants and the Q295E/N384D/Q418E/N421D pI variants on a first heterodimeric Fc chain, the S364K/E357Q skew variants on a second heterodimeric Fc chain, and the E233P/L234V/L235A/G236del/S267K ablation variants and N297S variant that removes glycosylation on both chains. Heterodimeric Fc backbone 8 is based on human IgG4, and includes the L368D/K370S skew variants and the Q295E/N384D/Q418E/N421D pI variants on a first heterodimeric Fc chain, the S364K/E357Q skew variants on a second heterodimeric Fc chain, and the S228P (according to EU numbering, S241P in Kabat) variant that ablates Fab arm exchange (as is known in the art) on both chains. Heterodimeric Fc backbone 9 is based on human IgG2, and includes the L368D/K370S skew variants and the Q295E/N384D/Q418E/N421D pI variants on a first heterodimeric Fc chain, the S364K/E357Q skew variants on a second heterodimeric Fc chain. Heterodimeric Fc backbone 10 is based on human IgG2, and includes the L368D/K370S skew variants and the Q295E/N384D/Q418E/N421D pI variants on a first heterodimeric Fc chain, the S364K/E357Q skew variants on a second heterodimeric Fc chain, and the S267K ablation variant on both chains. Heterodimeric Fc backbone 11 is based on human IgG1 (356E/358M allotype), and includes the L368D/K370S skew variants and the Q295E/N384D/Q418E/N421D pI variants on a first heterodimeric Fc chain, the S364K/E357Q skew variants on a second heterodimeric Fc chain, and the E233P/L234V/L235A/G236del/S267K ablation variants and M428L/N434S Xtend variants on both chains. Heterodimeric Fc backbone 12 is based on human IgG1 (356E/358M allotype), and includes the L368D/K370S skew variants on a first heterodimeric Fc chain, the S364K/E357Q skew variants and P217R/P229R/N276K pI variants on a second heterodimeric Fc chain, and the E233P/L234V/L235A/G236de1/S267K ablation variants on both chains. Heterodimeric Fc backbone 13 is based on human IgG1 (356D/358L allotype), and includes the L368D/K370S skew variants and the Q295E/N384D/Q418E/N421D pI variants on a first heterodimeric Fc chain, the S364K/E357Q skew variants on a second heterodimeric Fc chain, and the E233P/L234V/L235A/G236de1/S267K ablation variants and M428L/N434S Xtend variants on both chains. Heterodimeric Fc backbone 14 is based on human IgG1 (356E/358M allotype), and includes the L368D/K370S skew variants and the Q295E/N384D/Q418E/N421D pI variants on a first heterodimeric Fc chain, the S364K/E357Q skew variants on a second heterodimeric Fc chain, and the E233P/L234V/L235A/G236del/S267K ablation variants and M428L/N434A Xtend variants on both chains. Heterodimeric Fc backbone 15 is based on human IgG1 (356D/358L allotype), and includes the L368D/K370S skew variants and the Q295E/N384D/Q418E/N421D pI variants on a first heterodimeric Fc chain, the S364K/E357Q skew variants on a second heterodimeric Fc chain, and the E233P/L234V/L235A/G236del/S267K ablation variants and M428L/N434A Xtend variants on both chains.

[0120] Included within each of these backbones are sequences that are 90, 95, 98 and 99% identical (as defined herein) to the recited sequences, and/or contain from 1, 2, 3, 4, 5, 6, 7, 8, 9 or 10 additional amino acid substitutions (as compared to the “parent” of the Figure, which, as will be appreciated by those in the art, already contain a number of amino acid modifications as compared to the parental human IgG1 (or IgG2 or IgG4, depending on the backbone). That is, the recited backbones may contain additional amino acid modifications (generally amino acid substitutions) in addition or as an alternative to the skew, pI and ablation variants contained within the backbones of this Figure. Additionally, the backbones depicted herein may include deletion of the C-terminal glycine (K446_) and/or lysine (K447_). The C-terminal glycine and/or lysine deletion may be intentionally engineered to reduce heterogeneity or in the context of certain bispecific formats, such as the mAb-scFv format. Additionally, C-terminal glycine and/or lysine deletion may occur naturally for example during production and storage.

[0121] FIG. 10 depicts illustrative sequences ofheterodimeric STEAP1 x CD28 and CEACAM5 x CD28 bsAb backbone for use in the 2+1 mAb-scFv format. The format depicted here is based on heterodimeric Fc backbone 1 as depicted in FIG. 9, except further including G446_on monomer 1 (−) and G446_/K447_on monomer 2 (+). It should be noted that any of the additional backbones depicted in FIG. 9 may be adapted for use in the 2+1 mAb-scFv format with or without including K447_on one or both chains. It should be noted that these sequences may further include the M428L/N434S variants.

[0122] FIG. 11 depicts sequences for “CH1” that find use in embodiments of STEAP1 x CD28 bsAbs.

[0123] FIG. 12 depicts sequences for “hinge” that find use in embodiments of STEAP1 x CD28 and CEACAM5 x CD28 bsAbs.

[0124] FIG. 13 depicts the constant domain of the cognate light chains that find use in the subject STEAP1 x CD28 and CEACAM5 x CD28 bsAb that utilize a Fab binding domain.

[0125] FIGS. 14A-14N depicts bispecific formats of the present invention. FIG. 14A depicts the “1+1 Fab-scFv-Fc” format, with a first Fab arm binding a first antigen and a second scFv arm binding second antigen. The 1+1 Fab-scFv-Fc format comprises a first monomer comprising a first heavy chain variable region (VH1) covalently attached to the N-terminus of a first heterodimeric Fc backbone (optionally via a linker), a second monomer comprising a single-chain Fv covalently attached to the N-terminus of a second corresponding heterodimeric Fc backbone (optionally via a linker), and a third monomer comprising a light chain variable region covalently attached to a light chain constant domain, wherein the light chain variable region is complementary to the VH1. FIG. 14B depicts the “2+1 Fab2-scFv-Fc” format, with a first Fab arm and a second Fab-scFv arm, wherein the Fab binds a first antigen and the scFv binds second antigen. The 2+1 Fab2-scFv-Fc format comprises a first monomer comprising a first heavy chain variable region (VH1) covalently attached to the N-terminus of a first heterodimeric Fc backbone (optionally via a linker), a second monomer comprising the VH1 covalently attached (optionally via a linker) to a single-chain Fv covalently attached (optionally via a linker) to the N-terminus of a second corresponding heterodimeric Fc backbone, and a third monomer comprising a light chain variable region covalently to a light chain constant domain, wherein the light chain variable region is complementary to the VH1. FIG. 14C depicts the “1+1 Common Light Chain” or “1+1 CLC” format, with a first Fc comprising a first Fab arm binding a first antigen and a second Fc comprising a second Fab arm binding second antigen. The 1+1 CLC format comprises a first monomer comprising VH1-CH1-hinge-CH2-CH3, a second monomer comprising VH2-CH1-hinge-CH2-CH3, and a third monomer comprising VL-CL. The VL pairs with the VH1 to form a binding domain with a first antigen binding specificity; and the VL pairs with the VH2 to form a binding domain with a second antigen binding specificity. FIG. 14D depicts the “2+1 Common Light Chain” or “2+1 CLC” format, with a first Fc comprising 2 Fab arms each binding a first antigen and a second Fc comprising 1 Fab arm binding a second antigen. The 2+1 CLC format comprises a first monomer comprising VH1-CH1-hinge-VH1-CH1-hinge-CH2-CH3, a second monomer comprising VH2-CH1-hinge-CH2-CH3, and a third monomer comprising VL-CL. The VL pairs with the first and second VH1 to form binding domains with a first antigen binding specificity; and the VL pairs with the VH2 to form a binding domain with a second antigen binding specificity. FIG. 14E depicts the “2+1 mAb-scFv” format, with a first Fc comprising an N-terminal Fab arm binding a first antigen and a second Fc comprising an N-terminal Fab arm binding the first antigen and a C-terminal scFv binding a second antigen. The 2+1 mAb-scFv format comprises a first monomer comprising VH1-CHT-hinge-CH2-CH3, a second monomer comprising VH1-CHT-hinge-CH2-CH3-scFv, and a third monomer comprising VL-CL. The VL pairs with the first and second VH1 to form binding domains with binding specificity for the first antigen. FIG. 14F depicts the “2+1 Fab2-Fc x scFv-Fc” format, with a first Fc comprising two N-terminal Fab arms binding a first antigen and a second Fc domain comprising an N-terminal scFv binding a second antigen. The 2+1 Fab2-Fc x scFv-Fc format comprises a first monomer comprising VH1-CHT-VH2-CH1-hinge-CH2-CH3, a second monomer comprising scFv-domain linker-CH2-CH3, and a third and fourth monomer comprising VL-CL. The VL pairs with the VH1 and VH2 to form binding domains with binding specificity for the first antigen. Additional bispecific formats include G) dual scFv, H) one-arm scFv-mAb, I) scFv-mAb, J) bispecific mAb, K) one-arm central-scFv, L) mAb-Fv, M) central-Fv, and N) trident.

[0126] FIG. 15 depicts the variable heavy and variable light chain sequences for 1A7, an exemplary phage-derived CD28 binding domain, as well as the sequences for XENP28428, an anti-CD28 mAb based on 1A7 and IgG1 backbone with E233P/L234V/L235A/G236del/S267K ablation variant. CDRs are underlined and slashes indicate the border(s) between the variable regions and constant domain. As noted herein and is true for every sequence herein containing CDRs, the exact identification of the CDR locations may be slightly different depending on the numbering used as is shown in Table 2, and thus included herein are not only the CDRs that are underlined but also CDRs included within the VH and VL domains using other numbering systems. Furthermore, as for all the sequences in the Figures, these VH and VL sequences can be used either in a scFv format or in a Fab format.

[0127] FIGS. 16A-16F depict the sequences for affinity-optimized variable heavy domains from anti-CD28 clone 1A7. It should be noted that the variable heavy domains can be paired with any of the other variable light domains depicted in FIGS. 15, 17 and 18 including SEQ ID NOs: XXX-YYY.

[0128] FIGS. 17A-171 depict the sequences for affinity-optimized variable light domain from anti-CD28 clone 1A7. It should be noted that the variable heavy domains can be paired with any of the other variable light domains depicted in FIGS. 15, 16 and 18 including SEQ ID NOs: XXX-YYY.

[0129] FIGS. 18A-18C depict the sequence for illustrative affinity-optimized 1A7 VH/VL pairs. It should be noted that these pairs may be formatted as Fabs or as scFvs. Additionally, in the scFv format, these pairs may be formatted in the VH VL orientation or the VLVH orientation.

[0130] FIGS. 19A and 19B depict consensus framework regions (FR) and complementarity determining regions (CDRs) (as in Kabat) for anti-CD28 clone 1A7 variable heavy and variable light domain variants.

[0131] FIG. 20 depicts illustrative affinity-engineered 1A7 VH/VL pairs and their binding affinities in the context of scFvs (in the context of 1+1 Fab-scFv-Fc bsAb format).

[0132] FIGS. 21A-21H depict the variable heavy and variable light chain sequences for additional CD28 binding domains which find use in the STEAP1 x CD28 and CEACAM5 x CD28 bsAbs of the invention. As noted herein and is true for every sequence herein containing CDRs, the exact identification of the CDR locations may be slightly different depending on the numbering used as is shown in Table 2, and thus included herein are not only the CDRs that are underlined but also CDRs included within the VH and VL domains using other numbering systems. Furthermore, as for all the sequences in the Figures, these VH and VL sequences can be used either in a scFv format or in a Fab format.

[0133] FIG. 22 depicts the variable heavy and variable light chain sequences for exemplary STEAP1 binding domains which find use in the STEAP1 x CD28 and CEACAM5 x CD28 bsAbs of the invention. As noted herein and is true for every sequence herein containing CDRs, the identification of the CDR locations may be determined according to the numbering schemes as are shown in Table 2. Furthermore, as for all the sequences in the Figures, these VH and VL sequences can be used either in a scFv format or in a Fab format.

[0134] FIGS. 23A and 23B depict A) classic T cell/APC interaction and B) replication of the classic T cell/APC interaction by combining CD3 bispecific antibodies with CD28 bispecific antibodies. In classic T cell/APC interaction, there is a first signal provided by TCR reactivity with peptide-MHC (Signal 1) and a second signal provided by CD28 crosslinking by CD80/CD86 being expressed on APCs (Signal 2) which together fully activate T cells. In contrast in treatment with CD3 bispecifics, only the first signal is provided. The CD28 signal may be provided by a CD28 bispecific with the idea to promote activation and proliferation through CD28 costimulation. In some embodiments, TAA1 and TAA2 may be different antigens. In some embodiments, TAA1 and TAA2 may be same antigen but different epitopes. In some embodiments, TAA1 and TAA2 may be same antigen and same epitope.

[0135] FIGS. 24A-24I depict the sequences for illustrative STEAP1 x CD28 bsAbs in the 1+1 Fab-scFv-Fc format. Slashes indicate the border(s) of the variable domains and other domains e.g., domain linkers and constant domains. In addition, the naming convention illustrates the orientation of the scFv from N- to C-terminus. As noted herein and is true for every sequence herein containing CDRs, the identification of the CDR locations may be determined according to the numbering schemes as are shown in Table 2. It should be noted that the STEAP1 x CD28 bsAbs can utilize variable region, Fc region, and constant domain sequences that are 90, 95, 98 and 99% identical (as defined herein), and/or contain from 1, 2, 3, 4, 5, 6, 7, 8, 9 or 10 amino acid substitutions. In addition, each sequence outlined herein can include or exclude the M428L/N434S variants in one or preferably both Fc domains, which including M428L/N434S results in longer half-life in serum.

[0136] FIGS. 25A-25F depict sequences for exemplary anti-CD3 binding domains suitable for use in CD3 bispecific antibodies which may be combined with the CD28 bispecific antibodies of the invention. The CDRs are underlined, the scFv linker is double underlined (in the sequences, the scFv linker is a positively charged scFv (GKPGS)4 linker (SEQ ID NO: 24), although as will be appreciated by those in the art, this linker can be replaced by other linkers, including uncharged or negatively charged linkers, some of which are depicted in FIG. 6), and the slashes indicate the border(s) of the variable domains. In addition, the naming convention illustrates the orientation of the scFv from N- to C-terminus.

[0137] As noted herein and is true for every sequence herein containing CDRs, the exact identification of the CDR locations may be slightly different depending on the numbering used as is shown in Table 2, and thus included herein are not only the CDRs that are underlined but also CDRs included within the VH and VL domains using other numbering systems. Furthermore, as for all the sequences in the Figures, these VH and VL sequences can be used either in a scFv format or in a Fab format.

[0138] FIG. 26 depicts the induction of IL-2 secretion by STEAP1 x CD28 bsAb XENP44562 in combination with a constant dose of 1 μg/ml illustrative EpCAM x CD3 bsAb. Purified T cells were incubated with 22Rv1-STEAP1 tumor cells at 1:10 effector:target (E:T) ratio and test articles for 24 hours, and cell supematants were assayed by MSD for IL-2.

[0139] FIGS. 27A-27Q depict illustrative STEAP1 x CD28 bsAbs in the 2+1 mAb-scFv-Fc format.

[0140] FIG. 28 depicts an exemplary STEAP1 x CD28 in the 2+1 Fab2-Fc x scFv-Fc format.

[0141] FIG. 29 depicts the ability of XENP46214, a STEAP1 x CD28 bsAb in the 1 +1 Fab-scFv-Fc format to conditionally enhance T cell activation in the presence of STEAP1 antigen when used in combination with an illustrative B7H3 x CD3 engager.

[0142] FIGS. 30A-30CZ depict amino acid sequences for STEAP-A[STEAP1 ]variants in a bivalent mAb format. CDRs are underlined and slashes indicate the border(s) of variable regions.

[0143] FIGS. 31A-31U depict engineered variants of the variable heavy domain of the STEAP-A[STEAP-1] Fv.

[0144] FIGS. 32A-32J depict engineered variants of the variable light domain of a STEAP-A[STEAP-1] Fv.

[0145] FIG. 33 depicts the results of an experiment in which co-cultures of T cells and 22Rv1-STEAPT cancer cells (1:1 E:T ratio) were treated with 0.5 pg/mL of illustrative B7H3 x CD3 bsAb either alone or in combination with 1 μg/mL of a STEAP1 x CD28 bsAb. Cell killing was tracked and analyzed over a period of 6 days via Incucyte. As illustrated, in combination with B7H3 x CD3, STEAP1 x CD28 bsAbs significantly enhanced target cell killing.

[0146] FIGS. 34A-34D depict the C4-2B cell binding data from the second round of affinity engineering, sorted by maximum MFI. It illustrates both the successful improvement of cell binding as well as the unpredictable nature of combining various single point mutations.

[0147] FIGS. 35A and 35B depict the results of an experiment in which co-cultures of T cells and 22Rv1 cells (1:1 E:T ratio) were treated with 1 μg/mL of a STEAP1 x CD28 bsAb or an illustrative B7H3 x CD28 bsAb in combination with A) 10 μg/mL of illustrative PSMA x CD3 bsAb or B) 10 μg/mL of illustrative STEAP1 x CD3 bsAb. Cell killing was tracked and analyzed over time via Incucyte. As illustrated, STEAP1 x CD28 bsAbs induced significantly better tumor cell killing when compared with illustrative B7H3 x CD28 bsAb.

[0148] FIG. 36 depicts avid binding of STEAP1 x CD28 bsAb in the 2+1 mAb-scFv format as well as the more potent induction of IL-2 in the 2+1 mAb-scFv format.

[0149] FIG. 36 also depicts the higher antigen binding capacity of STEAP1 x CD28 bsAbs in the 1 +1 Fab-scFv-Fc format.

[0150] FIG. 37 depicts the induction of IL2 secretion from purified T cells incubated with 22RV1-STEAP1 tumor cells at a 1:1 effector:target ratio and 1 μg/ml of the indicated illustrative CD3 bispecific and dose escalation of STEAP1 x CD28 bsAb.

[0151] FIG. 38 depicts T cell proliferation as indicated by CD4⁺ T cell counts after purified T cell incubated with 22Rv1 tumor cells at 1:1 effector:target ratio, with 1 μg/ml illustrative A) B7H3 x CD3 bsAb and B) PSMA x CD3 bsAb and dose escalation of the indicated STEAP1 x CD28 bsAb.

[0152] FIG. 39 depicts the variable heavy, variable light, and CDR sequences for STEAP1 binding domains [STEAP-A]_H1.230_L1.100 and [STEAP-A]_H1.230_L1.115.

[0153] FIG. 40 depicts an exemplary STEAP1 x CD28 bsAb in the 2+1 central-scFv format.

[0154] FIGS. 41A-41G depict the variable heavy and variable light chain sequences for exemplary CEACAM5 binding domains which find use in the CEACAM5 x CD28 bsAbs of the invention. As noted herein and is true for every sequence herein containing CDRs, the identification of the CDR locations may be determined according to the numbering schemes as are shown in Table 2. Furthermore, as for all the sequences in the Figures, these VH and VL sequences can be used either in a scFv format or in a Fab format.

[0155] FIGS. 42A-42YYY depict the sequences for illustrative CEACAM5 x CD28 bsAbs in the 1+1 Fab-scFv-Fc format. Slashes indicate the border(s) of the variable domains and other domains e.g., domain linkers and constant domains. In addition, the naming convention illustrates the orientation of the scFv from N- to C-terminus. As noted herein and is true for every sequence herein containing CDRs, the identification of the CDR locations may be determined according to the numbering schemes as are shown in Table 2. It should be noted that the CEACAM5 x CD28 bsAbs can utilize variable region, Fc region, and constant domain sequences that are 90, 95, 98 and 99% identical (as defined herein), and/or contain from 1, 2, 3, 4, 5, 6, 7, 8, 9 or 10 amino acid substitutions. In addition, each sequence outlined herein can include or exclude the M428L/N434S variants in one or preferably both Fc domains, which including M428L/N434S results in longer half-life in serum.

[0156] FIGS. 43A-43F depicts induction of IL2 secretion from purified T cell incubated with A) MKN45, B) HPAF-I1, C) LS1034, D) LS174T, E) Lovo, or F) HT-29 tumor cells at indicated effector:target (E:T) ratio and 1 μg/ml indicated CEACAM5 x CD28 bsAbs and dose escalation illustrative B7H3 x CD3 bsAb.

[0157] FIGS. 44A-44F depicts induction of IL2 secretion from purified T cell incubated with A) LS1034, B) HPAF-II, C) Lovo, D) LS174T, E) SNU-C1, or F) HT-29 tumor cells and 1 μg/ml illustrative B7H3 x CD3 bsAbs and dose escalation indicated CEACAM5 x CD28 bsAbs.

[0158] FIGS. 45A-45S depicts humanized CEACAM5 binding domain CEA-A, illustrative affinity-engineered VH and VL variants, as well as consensus framework regions (FR) and complementarity determining regions (CDRs) for the humanized and affinity-engineered variants.

[0159] FIG. 46A-46D depicts novel 1A7 VHs affinity-engineered to be paired with IGKV1-39 germline sequence (although they may also be paired with any 1A7 VL), as well as consensus framework regions (FR) and complementarity determining regions (CDRs).

[0160] FIG. 47 depicts affinity of novel 1A7 variants paired with IGKV1-39 human germline VL for human CD28.

[0161] FIG. 48A-48J depict the sequences for illustrative CEA x CD28 bsAbs in the 2+1 mAb-scFv format. Slashes indicate the border(s) of the variable domains and other domains e.g., domain linkers and constant domains. In addition, the naming convention illustrates the orientation of the scFv from N- to C-terminus. As noted herein and is true for every sequence herein containing CDRs, the identification of the CDR locations may be determined according to the numbering schemes as are shown in Table 2. It should be noted that the CEA x CD28 bsAbs can utilize variable region, Fc region, and constant domain sequences that are 90, 95, 98 and 99% identical (as defined herein), and/or contain from 1, 2, 3, 4, 5, 6, 7, 8, 9 or 10 amino acid substitutions. In addition, each sequence outlined herein can include or exclude the M428L/N434S variants in one or preferably both Fc domains, which including M428L/N434S results in longer half-life in serum.

[0162] FIG. 49A-49M depict the sequences for illustrative CEA x CD28 bsAbs in the 2+1 Fab₂-scFv-Fc format. Slashes indicate the border(s) of the variable domains and other domains e.g., domain linkers and constant domains. In addition, the naming convention illustrates the orientation of the scFv from N- to C-terminus. As noted herein and is true for every sequence herein containing CDRs, the identification of the CDR locations may be determined according to the numbering schemes as are shown in Table 2. It should be noted that the CEA x CD28 bsAbs can utilize variable region, Fc region, and constant domain sequences that are 90, 95, 98 and 99% identical (as defined herein), and/or contain from 1, 2, 3, 4, 5, 6, 7, 8, 9 or 10 amino acid substitutions. In addition, each sequence outlined herein can include or exclude the M428L/N434S variants in one or preferably both Fc domains, which including M428L/N434S results in longer half-life in serum.

[0163] FIG. 50A-50H depict the sequences for illustrative CEA x CD28 bsAbs in the 2+1 Fab₂-Fc x scFv-Fc format. Slashes indicate the border(s) of the variable domains and other domains e.g., domain linkers and constant domains. In addition, the naming convention illustrates the orientation of the scFv from N- to C-terminus. As noted herein and is true for every sequence herein containing CDRs, the identification of the CDR locations may be determined according to the numbering schemes as are shown in Table 2. It should be noted that the CEA x CD28 bsAbs can utilize variable region, Fc region, and constant domain sequences that are 90, 95, 98 and 99% identical (as defined herein), and/or contain from 1, 2, 3, 4, 5, 6, 7, 8, 9 or 10 amino acid substitutions. In addition, each sequence outlined herein can include or exclude the M428L/N434S variants in one or preferably both Fc domains, which including M428L/N434S results in longer half-life in serum.

[0164] FIGS. 51A-51D depict induction T cell activation (as indicated by CD25 expression on A) CD4 T cells and B) CD8 T cells) and T cell proliferation (as indicated by C) CD4 and D) CD8 T cell counts) after purified T cell incubated with SNU-C1 tumor cells at 1:1 effector:target ratio and 1 μg/ml illustrative B7H3 x CD3 bsAb and dose escalation of XENP44338.

[0165] FIGS. 52A-52E depict induction of IL2 secretion from purified T cell incubated with A) HPAF-II (CEAhigh), B) MKN45 (CEAhigh), C) LS1074, D) LS174T (CEAmed-low), and E) HT-29 (CEAlow) tumor cells at 1:1 effector:target ratio and 1 μg/ml illustrative B7H3 x CD3 bsAb and dose escalation of indicated CEA x CD28 bsAbs having CD28 affinity ladder.

[0166] FIGS. 53A-53E depict induction of IL2 secretion from purified T cell incubated with A) HPAF-II (CEA^{high}), B) SNU-C1 (CEA^{high}), C) LS1034 (CEA^{med}), D) LS513 (CEA^{med-low}), and E) LS174T (CEA^{med-low}) tumor cells at indicated effector:target ratio and 1 μg/ml illustrative B7H3 x CD3 bsAb and dose escalation of indicated CEA x CD28 bsAbs in 1+1 Fab-scFv-Fc, 2+1 mAb-scFv, or 2+1 Fab₂-scFv-Fc formats.

[0167] FIG. 54 depicts EC50 of induction of IL2 secretion from purified T cell incubated with LS174T (CEAmea-^{low}) tumor cells at 1:1 effector:target ratio and 1 μg/ml illustrative B7H3 x CD3 bsAb and dose escalation of indicated CEA x CD28 bsAbs in 1+1 Fab-scFv-Fc or 2+1 Fab2-Fc x scFv-Fc formats with increasing concentrations of soluble CEA. The data show that while the 2+1 format is less efficacious and less potent, it better tolerates soluble CEA as indicated by more sCEA needed to shift EC50 from baseline.

[0168] FIGS. 55A-55C depicts mechanism-based modeling of trimer formation (i.e. trimer of bispecific antibody, T cell, and tumor cell) for bsAbs having a) 0.2 nM CEA binding domain, b) 2 nM CEA binding domain, and c) 15 nM CEA binding domain and increasing concentrations of soluble CEA.

[0169] FIG. 56 depicts induction of IL2 secretion from purified T cell incubated with HPAF-II tumor cells at 1:1 effector:target ratio and 1 μg/ml illustrative B7H3 x CD3 bsAb and dose escalation of indicated CEA x CD28 bsAbs having CEA-A H0L0 (˜0.7-2 nM), CEA-AH1L1 (˜5-8 nM), or CEA-AH1L2 (57-69 nM) with or without 1 μg/ml soluble CEA.

[0170] FIG. 57 depicts induction of IL2 secretion from purified T cell incubated with HPAF-II (CEA^{high}) tumor cells at 1:1 effector:target ratio and 1 μg/ml illustrative B7H3 x CD3 bsAb and dose escalation of indicated CEA x CD28 bsAbs having affinity-engineered CEA-A H1L1 variants (with or without 1 μg/ml sCEA).

[0171] FIG. 58 depicts induction of IL2 secretion from purified T cell incubated with HPAF-II (CEA^{high}) tumor cells at 1:1 effector:target ratio and 1 μg/ml illustrative B7H3 x CD3 bsAb and dose escalation of indicated CEA x CD28 bsAbs having affinity-engineered CEA-A H1L2 variants (with or without 1 μg/ml sCEA).

[0172] FIG. 59 depicts induction of IL2 secretion from purified T cell incubated with HPAF-II (CEA^{high}) tumor cells at 1:1 effector:target ratio and 1 μg/ml illustrative B7H3 x CD3 bsAb and dose escalation of indicated CEA x CD28 bsAbs having affinity-engineered CEA-A H1L1 and H1L2 variants.

[0173] FIG. 60 depicts induction of IL2 secretion from purified T cell incubated with HPAF-II (CEA^{high}) tumor cells at 1:1 effector:target ratio and 1 μg/ml illustrative B7H3 x CD3 bsAb and dose escalation of indicated CEA x CD28 bsAbs having affinity-engineered CEA-A H1L1 and H1L2 variants (with or without 1 μg/ml sCEA).

[0174] FIGS. 61A and 61B depict induction of IL2 secretion after A) 6 hours or B) 24 hours from purified T cell incubated with MKN-45 (CEA^{high}) or Lovo (CEA° ⁰) cells at 1:1 effector:target ratio with dose escalation of indicated CEA x CD28 bsAbs.

[0175] FIG. 62 depicts induction of IL2 secretion from purified T cell incubated with LS1034 tumor cells at 10:1 effector:target ratio with or without 20 nM PD-1 mAb and dose escalation of indicated CEA x CD28 bsAbs.

[0176] FIG. 63 depicts increase in thermostability of disulfide-stabilized 1A7 scFv.

[0177] FIG. 64 depicts CD28 affinity for additional 1A7 scFv variants, with or without disulfide stabilization (as denoted by [S-S]) obtained from different experiments in the context of different CD28 multispecific antibodies. While all scFvs depicted below used the scFv linker (GKPGS)4 (SEQ ID NO: 24), any scFv linker (including those in FIG. 5), can be used. Additionally, the scFv can be in either orientation, VH-scFv linker-VL or VL-scFv linker-VH.

[0178] FIGS. 65A-65E depict illustrative 1A7-based scFvs with engineered cysteines for disulfide stabilization. While all scFvs depicted below used the scFv linker (GKPGS)4 (SEQ ID NO: 24), any scFv linker (including those in FIG. 5), can be used.

[0179] Additionally, the scFv can be in either orientation, VH-scFv linker-VL or VL-scFv linker-VH, although only the former is shown.

[0180] FIG. 66 depicts induction of IL2 secretion from purified T cell incubated with HPAF-II tumor cells at 1:1 effector:target ratio and 1 μg/ml illustrative B7H3 x CD3 bsAb and dose escalation of indicated CEA x CD28 bsAbs having CD28 scFv with or without disulfide-stabilization.

[0181] FIG. 67 depicts A431-02M-null cells stably expressing CEACAM5 were engineered to express a CMV-derived (HLA-A2/NLVa) or a melanoma-derived (HLA-A2/G209; negative control) pMHC antigenic complex. Cells were cocultured with PBMCs from an HLA-A2⁺, CMV-seropositive donor, and treated with a dose titration of CEACAM5 x CD28 XENP45906.

[0182] FIG. 68 depicts induction of IL2 from purified T cell incubated with MKN45 (CEAhigh), HPAF-II (CEAhigh), LS1034 (CEAmed), LS174T (CEAmed), Lovo (CEAme^{d}), and HT29 (CEA° ^{W}) cells at 1:1 effector:target ratio and 1 μg/ml illustrative B7H3 x CD3 bsAb and dose escalation of CEA x CD28 XENP44915.

[0183] FIGS. 69A and 69B depict induction of A) CD8 T cell activation (as indicated by CD25 expression) and B) tumor cell killing after incubating purified T cells with HPAF-II (CEA^{high}) cells and 0.1 or 1 μg/ml illustrative B7H3 x CD3 bsAb and dose escalation of CEA x CD28 XENP44915. The data show that CEA x CD28 synergizes with high and low concentrations of T-cell engager.

[0184] FIGS. 70A-70F depict induction of IL2 secretion from purified T cell incubated with A) MKN45, B) HPAF-II, C) LS1034, D) LS174T, E) Lovo, and F) HT-29 cells at 1:1 effector:target ratio and 1 μg/ml illustrative B7H3 x CD3 bsAb and dose escalation of indicated CEA x CD28 bsAbs having CD28 scFv with or without disulfide-stabilization and with CEA binding domains having varying affinities.

[0185] FIGS. 71A-71D depict induction of IL2 secretion from purified T cell incubated with A) MKN-45, B) LS174T, C) Lovo, and D) HT-29 tumor cells at 1:1 effector:target ratio and 1 μg/ml illustrative B7H3 x CD3 bsAb and dose escalation of indicated CEA x CD28 bsAbs in 1+1 Fab-scFv-Fc or 2+1 Fab₂-Fc x scFv-Fc format.

[0186] FIGS. 72A-72B depict induction of IL2 secretion from purified T cell incubated with indicated tumor cells at 1:1 effector:target ratio and 1 μg/ml illustrative B7H3 x CD3 bsAb and dose escalation of A) XENP45906 or B) XENP46322.

[0187] FIG. 73 depicts induction of A) LS-174T or B) Lovo cancer cell kill by purified T cell incubated at 1:1 effector:target ratio and 1 μg/ml CEACAM5 x CD28 bsAbs XENP45906 or XENP46322 and dose escalation illustrative B7H3 x CD3 bsAb.

[0188] FIG. 74 depicts induction of HPAF-II cancer cell kill by purified T cell incubated at 1:1 effector:target ratio and CEACAM5 x CD28 bsAbs A) XENP45906 or B) XENP46322 and dose illustrative EpCAM x CD3 bsAb.

[0189] FIG. 75 depicts induction of IL2 secretion by purified CMV-reactive T cell incubated at 10:1 effector:target ratio with A431 HLA-A2/NLV CEA knock-in cells with A) 250K, B) 100K, and C) 34K CEACAM5 antigen density and dose escalation CEACAM5 x CD28 bsAbs XENP45906 or XENP46322 alone or with anti-PD1.

[0190] FIG. 76 depicts induction of IL2 secretion by purified T cell incubated at 1:1 effector:target ratio with HPAF-II and dose escalation CEACAM5 x CD28 bsAbs A) XENP45906 or B) XENP46322 with 1 pg B7H3 x CD3 with or without varying concentrations of soluble CEA. C) Fold Change.

[0191] FIG. 77 depicts the change in tumor volume (as determined by caliper measurements) over time in HPAF-II and huPBMC-engrafted NSG-DKO mice dosed with A) XENP46322 or B) XENP45906 with illustrative EpCAM x CD3 bsAb.

[0192] FIG. 78 depicts A) human CD45⁺, B) human CD4⁺ and C) human CD8⁺ cell counts on Day 21 in HPAF-II and huPBMC-engrafted NSG-DKO mice dosed with XENP46322 or XENP45906 with illustrative EpCAM x CD3 bsAb.

[0193] FIG. 79 depicts Octet sensorgrams 25° C. showing binding of CEACAM5 x CD28 bsAbs having CEA-A_H0L0, CEA-A H1L1, or CEA-A_H1L2 to CEACAM5 and CEACAM8.

[0194] FIG. 80 depicts binding of CEACAM5 x CD28 bsAbs having further engineered variants of CEA-A_H1.7_L2.15 to CEACAM5 and CEACAM8 as determined by Octet at 25° C.

[0195] FIG. 81 depicts induction of IL2 secretion by purified T cells in the presence of A) HPAF-II or B) LS174T cancer cells and dose titration of CEACAM5 x CD28 engineered for reduced for reduced CEACAM8 cross reactivity and 1 μg/ml B7H3 x CD3 bsAb with or without 1 μg/ml soluble CEA.

[0196] FIG. 82 depicts sequence for IGKV1-39 human germline (CDRs underlined). These may be paired with any of the 1A7 depicted herein, although preferable pairs are those depicted in FIG. 47.

### DETAILED DESCRIPTION

### I. Overview

[0197] Six-Transmembrane Epithelial Antigen of the Prostate 1 (STEAP1 ) is a cell surface antigen that functions in cellular iron homeostasis. Carcinoembryonic antigen-related cell adhesion molecule 5 (CEACAM5) is a cell surface glycoprotein, and member of the carcinoembryonic (CEA) antigen family. As STEAP1 and CEACAM5 are overexpressed on a variety of tumors, these tumor antigens are candidates for targeted therapeutic development.

[0198] The activation of T cells in the treatment of cancer is being widely investigated. T cells require multiple signals for complete activation and differentiation. As shown in FIG. 23A, Signal 1, promoted by recognition of a peptide-MHC (pMHC) complex by the T cell receptor (TCR), is absolutely required for T cell activation. Signal 2, which synergizes with, and amplifies signal 1, is typically provided by the interaction of the CD28 ligands CD80 and CD86 with CD28 itself. Although CD28 engagement alone is typically inert, when combined with signal 1 activation, it promotes additional activation, survival, and proliferative signals, including IL-2 secretion. As CD80 and CD86 are only naturally expressed by professional antigen-presenting cells (APC), the extent of CD28 costimulation in the tumor setting can be highly variable. Accordingly, the present invention is directed to a novel class of tumor-targeted anti-CD28 x anti-STEAP1 bispecific antibodies, the CD80/CD86 engagement of CD28 that mimic the CD80/CD86 engagement of CD28, thereby providing an artificial source of signal 2 (FIG. 23B). Notably, signal 1 can either be provided by the natural TCR:pMHC recognition of tumor cells, or it can be provided by combination of the CD28 bispecific with a CD3 bispecific (e.g., anti-CD3 x anti-STEAP1 ), which can mimic signal 1.

[0199] Accordingly, provided herein are novel anti-CD28 x anti-STEAP1 (also referred to as “uCD28 x uSTEAP1 ” and sometimes “CD28 x STEAP1 ”) and anti-CD28 x anti-CEACAM5 (also referred to as “uCD28 x uCEACAM5” and sometimes “CD28 x CEACAM5”) bispecific antibodies and methods of using such antibodies for the treatment of cancers. In many cases, these bispecific antibodies are heterodimeric. Subject uCD28 x uSTEAP1 antibodies are capable of agonistically binding to CD28 costimulatory molecules on T cells and targeting to STEAP1 on STEAP1 -expressing tumor cells. Similarly, subject uCD28 x uCEACAM5 antibodies are capable of agonistically binding to CD28 costimulatory molecules on T cells and targeting to CEACAM5 on CEACAM5-expressing tumor cells.

[0200] Thus, such antibodies selectively enhance anti-tumor activity at tumor sites that express the target antigen of interest while minimizing peripheral toxicity.

[0201] The subject antibodies provided herein are particularly useful for enhancing anti-tumor activity either alone, as a monotherapy, or when used in combination with other anti-cancer therapies as more fully described herein.

[0202] Accordingly, in one aspect, provided herein are heterodimeric antibodies that bind to two different antigens, e.g., the antibodies are “bispecific,” in that they bind two different target antigens, generally CD28 and STEAP1 or CD28 and CEACAM5 as described below. These heterodimeric antibodies can bind each of the target antigens either monovalently (e.g., there is a single antigen binding domain such as a variable heavy and variable light domain pair) or bivalently (there are two antigen binding domains that each independently bind the antigen). In some embodiments, the heterodimeric antibody provided herein includes: a) one CD28 binding domain; and b) one STEAP1 or CEACAM5 binding domain (e.g., heterodimeric antibodies in the “1+1 Fab-scFv-Fc” format described herein, which are thus bispecific and bivalent). In other embodiments, the heterodimeric antibody provided herein includes: a) one CD28 binding domain; and b) two STEAP1 or CEACAM5 binding domains (e.g., heterodimeric antibodies in the “2+1 Fab2-scFv-Fc,” “2+1 mAb-scFv” and “2+1 Fab2-Fc x scFv-Fc” formats described herein, which are thus bispecific but trivalent, as they contain three antigen binding domains (ABDs)). The heterodimeric antibodies provided herein are based on the use of different monomers that contain amino acid substitutions (i.e., skew variants”) that “skew” formation of heterodimers over homodimers, as is more fully outlined below. In some embodiments, the heterodimer antibodies are also coupled with purification variants (e.g., “pI variants”) that allow simple purification of the heterodimers away from the homodimers, as is similarly outlined below.

[0203] The heterodimeric bispecific antibodies provided generally rely on the use of engineered or variant Fc domains that can self-assemble in production cells to produce heterodimeric proteins, and methods to generate and purify such heterodimeric proteins.

### II. Nomenclature

[0204] The naming nomenclature of particular antigen binding domains (e.g., STEAP1 and CD28 binding domains) use a “Hx.xx Ly.yy” type of format, with the numbers being unique identifiers to particular variable chain sequences. Thus, for example, the CD28 binding domain “1A7[CD28]H1 L1” (FIG. 15) includes a variable heavy domain, H1, and a variable light domain L1. In the case that these sequences are used as scFvs, the designation “H1iL1”, indicates that the binding domain includes a variable heavy domain “H1” combined with a variable light domain “L1,” and is in VH-linker-VL orientation, from N- to C-terminus. This molecule with the identical sequences of the heavy and light variable domains but in the reverse order (VL-linker-VH orientation, from N- to C-terminus) would be designated “L1iH1”. Similarly, different constructs may “mix and match” the heavy and light chains as will be evident from the sequence listing and the Figures.

### III. Definitions

[0205] In order that the application may be more completely understood, several definitions are set forth below. Such definitions are meant to encompass grammatical equivalents.

[0206] By “CD28,” “Cluster of Differentiation 28,” and “Tp44” (e.g., Genebank Accession Numbers NP_001230006 (human), NP_001230007 (human), NP_006130 (human), and NP_031668 (mouse)) herein is meant a B7 receptor expressed on T cells that provides co-stimulatory signals required for T cell activation and survival. T cell stimulation through CD28 in addition to the T cell receptor (TCR) provides a potent signal for the production of various interleukins. CD28 is the receptor for CD80 (B7.1) and CD86 (B7.2) proteins. CD28 includes an intercellular domain with aYMNM motif (SEQ ID NO: 2683) critical for the recruitment of SH2-domain containing proteins, particularly PI3K. CD28 also includes two proline-rich motifs that are able to bind SH3-containing proteins. Exemplary CD28 sequences are depicted in FIG. 1. Unless otherwise noted, references to CD28 are to the human CD28 sequence.

[0207] By “STEAP1 ,” “PRSS24,” “six transmembrane epithelial antigen of the prostate 1,” or “STEAP family member 1” as used herein is meant a metalloproteinase that functions in in iron and cooper homeostasis, and includes six transmembrane domains, three extracellular loops and two intracellular loops. STEAP1 is expressed in particular cancers, including prostate cancer, wherein STEAP1 is overexpressed in malignant prostate tissue relative to normal prostate tissue. Exemplary STEAP1 sequences are depicted in FIG. 2.

[0208] By “CEACAM5,” “carcinoembryonic antigen-related cell adhesion molecule 5,” “CEA cell adhesion molecule 5,” “CD66e” or “Cluster of Differentiation 66e” or “CEA” herein is member of the carcinoembryonic antigen (CEA) family of cell surface glycoproteins involved in cell adhesion. CEACAM5 sequences are depicted, for example, in FIG. 2. CECAM is overexpressed in a variety of carcinomas, including those of the gastrointestinal tract, the respiratory and genitourinary systems, and breast cancer.

[0209] By “ablation” as used herein is meant a decrease or removal of activity. Thus, for example, “ablating FcγR binding” means the Fc region amino acid variant has less than 50% starting binding as compared to an Fc region not containing the specific variant, with more than 70-80-90-95-98% loss of activity being preferred, and in general, with the activity being below the level of detectable binding in a Biacore, SPR or BLI assay. Of particular use in the ablation of FcγR binding are those shown in FIG. 5, which generally are added to both monomers.

[0210] By “ADCC” or “antibody dependent cell-mediated cytotoxicity” as used herein is meant the cell-mediated reaction, wherein nonspecific cytotoxic cells that express FcγRs recognize bound antibody on a target cell and subsequently cause lysis of the target cell. ADCC is correlated with binding to FcγRIIIa; increased binding to FcγRIIIa leads to an increase in ADCC activity.

[0211] By “ADCP” or antibody dependent cell-mediated phagocytosis as used herein is meant the cell-mediated reaction wherein nonspecific phagocytic cells that express FcγRs recognize bound antibody on a target cell and subsequently cause phagocytosis of the target cell.

[0212] As used herein, the term “antibody” is used generally. Antibodies provided herein can take on a number of formats as described herein, including traditional antibodies as well as antibody derivatives, fragments and mimetics, described herein.

[0213] Traditional immunoglobulin (Ig) antibodies are “Y” shaped tetramers. Each tetramer is typically composed of two identical pairs of polypeptide chains, each pair having one “light chain” monomer (typically having a molecular weight of about 25 kDa) and one “heavy chain” monomer (typically having a molecular weight of about 50-70 kDa).

[0214] Other useful antibody formats include, but are not limited to, the “1+1 Fab-scFv-Fc,” and “2+1 Fab2-scFv-Fc,” “2+1 mAb-scFv,” and “2+1 Fab2-Fc x scFv-Fc” formats provided herein (see, e.g., FIG. 14). Additional useful antibody formats include, but are not limited to, “1+1 common light chain,” and “2+1 common light chain,” “mAb-Fv,” “mAb-scFv,” “central-Fv”, “one-armed scFv-mAb,” “scFv-mAb,” “dual scFv,” and “trident” format antibodies (FIG. 14). See also, US20180127501A1, which is incorporated by reference herein, particularly in pertinent part relating to antibody formats (see, e.g., FIG. 2 of US20180127501A1).

[0215] Antibody heavy chains typically include a variable heavy (VH) domain, which includes vhCDR1-3, and an Fc domain, which includes a CH2-CH3 monomer. In some embodiments, antibody heavy chains include a hinge and CH1 domain. Traditional antibody heavy chains are monomers that are organized, from N- to C-terminus: VH-CH1-hinge-CH2-CH3. The CHT-hinge-CH2-CH3 is collectively referred to as the heavy chain “constant domain” or “constant region” of the antibody, of which there are five different categories or “isotypes”: IgA, IgD, IgG, IgE and IgM.

[0216] In some embodiments, the antibodies provided herein include IgG isotype constant domains, which has several subclasses, including, but not limited to IgG1, IgG2, IgG3, and IgG4. In the IgG subclass of immunoglobulins, there are several immunoglobulin domains in the heavy chain. By “immunoglobulin (Ig) domain” herein is meant a region of an immunoglobulin having a distinct tertiary structure. Of interest in the present invention are the heavy chain domains, including, the constant heavy (CH) domains and the hinge domains.

[0217] In the context of IgG antibodies, the IgG isotypes each have three CH regions. Accordingly, “CH” domains in the context of IgG are as follows: “CH1” refers to positions 118-215 according to the EU index as in Kabat. “Hinge” refers to positions 216-230 according to the EU index as in Kabat. “CH2” refers to positions 231-340 according to the EU index as in Kabat, and “CH3” refers to positions 341-447 according to the EU index as in Kabat. As shown in Table 1, the exact numbering and placement of the heavy chain domains can be different among different numbering systems. As shown herein and described below, the pI variants can be in one or more of the CH regions, as well as the hinge region, discussed below.

[0218] It should be noted that IgG1 has different allotypes with polymorphisms at 356 (D or E) and 358 (L or M). The sequences depicted herein use the 356E/358M allotype, however the other allotype is included herein. That is, any sequence inclusive of an IgG1 Fc domain included herein can have 356D/358L replacing the 356E/358M allotype. It should be understood that therapeutic antibodies can also comprise hybrids of isotypes and/or subclasses. For example, as shown in US Publication 2009/0163699, incorporated by reference, the present antibodies, in some embodiments, include human IgG1/G2 hybrids.

[0219] By “Fc” or “Fc region” or “Fc domain” as used herein is meant the polypeptide comprising the constant region of an antibody, in some instances, excluding all of the first constant region immunoglobulin domain (e.g., CH1) or a portion thereof, and in some cases, optionally including all or part of the hinge. For IgG, the Fc domain comprises immunoglobulin domains CH2 and CH3 (Cy2 and Cy3), and optionally all or a portion of the hinge region between CH1 (Cy1) and CH2 (Cy2). Thus, in some cases, the Fc domain includes, from N- to C-terminal, CH2-CH3 and hinge-CH2-CH3. In some embodiments, the Fc domain is that from IgG1, IgG2, IgG3 or IgG4, with IgG1 hinge-CH2-CH3 and IgG4 hinge-CH2-CH3 finding particular use in many embodiments. Additionally, in the case of human IgG1 Fc domains, the hinge may include a C220S amino acid substitution. Furthermore, in the case of human IgG4 Fc domains, the hinge may include a S228P amino acid substitution. Although the boundaries of the Fc region may vary, the human IgG heavy chain Fc region is usually defined to include residues E216, C226, or A231 to its carboxyl-terminal, wherein the numbering is according to the EU index as in Kabat. In some embodiments, as is more fully described below, amino acid modifications are made to the Fc region, for example to alter binding to one or more FcγR or to the FcRn.

[0220] By “heavy chain constant region” herein is meant the CHT-hinge-CH2-CH3 portion of an antibody (or fragments thereof), excluding the variable heavy domain; in EU numbering of human IgG1 this is amino acids 118-447. By “heavy chain constant region fragment” herein is meant a heavy chain constant region that contains fewer amino acids from either or both of the N- and C-termini but still retains the ability to form a dimer with another heavy chain constant region.

[0221] Another type of domain of the heavy chain is the hinge region. By “hinge” or “hinge region” or “antibody hinge region” or “hinge domain” herein is meant the flexible polypeptide comprising the amino acids between the first and second constant domains of an antibody. Structurally, the IgG CH1 domain ends at EU position 215, and the IgG CH2 domain begins at residue EU position 231. Thus for IgG the antibody hinge is herein defined to include positions 216 (E216 in IgG1) to 230 (P230 in IgG1), wherein the numbering is according to the EU index as in Kabat. In some cases, a “hinge fragment” is used, which contains fewer amino acids at either or both of the N- and C-termini of the hinge domain. As noted herein, pI variants can be made in the hinge region as well. Many of the antibodies herein have at least one the cysteines at position 220 according to EU numbering (hinge region) replaced by a serine. Generally, this modification is on the “scFv monomer” side (when 1+1 or 2+1 formats are used) for most of the sequences depicted herein, although it can also be on the “Fab monomer” side, or both, to reduce disulfide formation. Specifically included within the sequences herein are one or both of these cysteines replaced (C220S).

[0222] As will be appreciated by those in the art, the exact numbering and placement of the heavy chain constant region domains (i.e., CH1, hinge, CH2 and CH3 domains) can be different among different numbering systems. A useful comparison of heavy constant region numbering according to EU and Kabat is as below, see Edelman et al., 1969, Proc Natl Acad Sci USA 63:78-85 and Kabat et al., 1991, Sequences of Proteins of Immunological Interest, 5th Ed., United States Public Health Service, National Institutes of Health, Bethesda, entirely incorporated by reference.

TABLE 1

| | EU Numbering | Kabat Numbering |
|---|---|---|
| CH1 | 118-215 | 114-223 |
| Hinge | 216-230 | 226-243 |
| CH2 | 231-340 | 244-360 |
| CH3 | 341-447 | 361-478 |

[0223] The antibody light chain generally comprises two domains: the variable light domain (VL), which includes light chain CDRs vlCDR1-3, and a constant light chain region (often referred to as CL or CK). The antibody light chain is typically organized from N- to C-terminus: VL-CL.

[0224] By “antigen binding domain” or “ABD” herein is meant a set of six Complementary Determining Regions (CDRs) that, when present as part of a polypeptide sequence, specifically binds a target antigen (e.g., STEAP1 , CEACAM5, or CD28) as discussed herein. As is known in the art, these CDRs are generally present as a first set of variable heavy CDRs (vhCDRs or VHCDRs) and a second set of variable light CDRs (vlCDRs or VLCDRs), each comprising three CDRs: vhCDR1, vhCDR2, vhCDR3 variable heavy CDRs and vlCDR1, vlCDR2 and vlCDR3 vhCDR3 variable light CDRs. The CDRs are present in the variable heavy domain (vhCDR1-3) and variable light domain (vlCDR1-3). The variable heavy domain and variable light domain from an Fv region.

[0225] The present invention provides a large number of different CDR sets. In this case, a “full CDR set” comprises the three variable light and three variable heavy CDRs, e.g., a vlCDR1, vlCDR2, vlCDR3, vhCDR1, vhCDR2 and vhCDR3. These can be part of a larger variable light or variable heavy domain, respectfully. In addition, as more fully outlined herein, the variable heavy and variable light domains can be on separate polypeptide chains, when a heavy and light chain is used (for example when Fabs are used), or on a single polypeptide chain in the case of scFv sequences.

[0226] As will be appreciated by those in the art, the exact numbering and placement of the CDRs can be different among different numbering systems. However, it should be understood that the disclosure of a variable heavy and/or variable light sequence includes the disclosure of the associated (inherent) CDRs. Accordingly, the disclosure of each variable heavy region is a disclosure of the vhCDRs (e.g., vhCDR1, vhCDR2 and vhCDR3) and the disclosure of each variable light region is a disclosure of the vlCDRs (e.g., vlCDR1, vlCDR2 and vlCDR3). A useful comparison of CDR numbering is as below, see Lafranc et al., Dev Comp. Immunol. 27(1):55-77 (2003):

TABLE 2

| | Kabat + | | | | | | |
|---|---|---|---|---|---|---|---|
| | Chothia | IMGT | Kabat | AbM | Chothia | Contact | Xencor |
| vhCDR1 | 26-35 | 27-38 | 31-35 | 26-35 | 26-32 | 30-35 | 27-35 |
| vhCDR2 | 50-65 | 56-65 | 50-65 | 50-58 | 52-56 | 47-58 | 54-61 |
| vhCDR3 | 95-102 | 105-117 | 95-102 | 95-102 | 95-102 | 93-101 | 103-116 |
| vlCDR1 | 24-34 | 27-38 | 24-34 | 24-34 | 24-34 | 30-36 | 27-38 |
| vlCDR2 | 50-56 | 56-65 | 50-56 | 50-56 | 50-56 | 46-55 | 56-62 |
| vlCDR3 | 89-97 | 105-117 | 89-97 | 89-97 | 89-97 | 89-96 | 97-105 |

[0227] Throughout the present specification, the Kabat numbering system is generally used when referring to a residue in the variable domain (approximately, residues 1-107 of the light chain variable region and residues 1-113 of the heavy chain variable region) and the EU numbering system for Fc regions (e.g., Kabat et al., supra (1991)).

[0228] The CDRs contribute to the formation of the antigen-binding, or more specifically, epitope binding site of the antigen binding domains and antibodies. “Epitope” refers to a determinant that interacts with a specific antigen binding site in the variable region of an antibody molecule known as a paratope. Epitopes are groupings of molecules such as amino acids or sugar side chains and usually have specific structural characteristics, as well as specific charge characteristics. A single antigen may have more than one epitope.

[0229] The epitope may comprise amino acid residues directly involved in the binding (also called immunodominant component of the epitope) and other amino acid residues, which are not directly involved in the binding, such as amino acid residues which are effectively blocked by the specifically antigen binding peptide; in other words, the amino acid residue is within the footprint of the specifically antigen binding peptide.

[0230] Epitopes may be either conformational or linear. A conformational epitope is produced by spatially juxtaposed amino acids from different segments of the linear polypeptide chain. A linear epitope is one produced by adjacent amino acid residues in a polypeptide chain. Conformational and nonconformational epitopes may be distinguished in that the binding to the former but not the latter is lost in the presence of denaturing solvents.

[0231] An epitope typically includes at least 3, and more usually, at least 5 or 8-10 amino acids in a unique spatial conformation. Antibodies that recognize the same epitope can be verified in a simple immunoassay showing the ability of one antibody to block the binding of another antibody to a target antigen, for example “binning.” As outlined below, the invention not only includes the enumerated antigen binding domains and antibodies herein, but those that compete for binding with the epitopes bound by the enumerated antigen binding domains.

[0232] In some embodiments, the six CDRs of the antigen binding domain are contributed by a variable heavy and a variable light domain. In a “Fab” format, the set of 6 CDRs are contributed by two different polypeptide sequences, the variable heavy domain (vh or VH; containing the vhCDR1, vhCDR2 and vhCDR3) and the variable light domain (vl or VL; containing the vlCDR1, vlCDR2 and vlCDR3), with the C-terminus of the vh domain being attached to the N-terminus of the CH1 domain of the heavy chain and the C-terminus of the vl domain being attached to the N-terminus of the constant light domain (and thus forming the light chain). In a scFv format, the vh and vl domains are covalently attached, generally through the use of a linker (a “scFv linker”) as outlined herein, into a single polypeptide sequence, which can be either (starting from the N-terminus) vh-linker-vl or vl-linker-vh, with the former being generally preferred (including optional domain linkers on each side, depending on the format used. In general, the C-terminus of the scFv domain is attached to the N-terminus of all or part of the hinge in the second monomer.

[0233] By “variable region” or “variable domain” as used herein is meant the region of an immunoglobulin that comprises one or more Ig domains substantially encoded by any of the Vx, VW, and/or VH genes that make up the kappa, lambda, and heavy chain immunoglobulin genetic loci respectively, and contains the CDRs that confer antigen specificity. Thus, a “variable heavy domain” pairs with a “variable light domain” to form an antigen binding domain (“ABD”). In addition, each variable domain comprises three hypervariable regions (“complementary determining regions,” “CDRs”) (vhCDR1, vhCDR2 and vhCDR3 for the variable heavy domain and vlCDR1, vlCDR2 and vlCDR3 for the variable light domain) and four framework (FR) regions, arranged from amino-terminus to carboxy-terminus in the following order: FR1-CDRT-FR2-CDR2-FR3-CDR3-FR4.

[0234] By “Fab” or “Fab region” as used herein is meant the antibody region that comprises the VH, CH1, VL, and CL immunoglobulin domains, generally on two different polypeptide chains (e.g., VH-CHT on one chain and VL-CL on the other). Fab may refer to this region in isolation, or this region in the context of a bispecific antibody of the invention. In the context of a Fab, the Fab comprises an Fv region in addition to the CH1 and CL domains.

[0235] By “Fv” or “Fv fragment” or “Fv region” as used herein is meant the antibody region that comprises the VL and VH domains. Fv regions can be formatted as both Fabs (as discussed above, generally two different polypeptides that also include the constant regions as outlined above) and single chain Fvs (scFvs), where the vl and vh domains are included in a single peptide, attached generally with a linker as discussed herein.

[0236] By “single chain Fv” or “scFv” herein is meant a variable heavy domain covalently attached to a variable light domain, generally using a scFv linker as discussed herein, to form a scFv or scFv domain. A scFv domain can be in either orientation from N- to C-terminus (vh-linker-vl or vl-linker-vh). In the sequences depicted in the sequence listing and in the figures, the order of the vh and vl domain is indicated in the name, e.g., H.X_L.Y means N- to C-terminal is vh-linker-vl, and L.Y_H.X is vl-linker-vh.

[0237] Some embodiments of the subject antibodies provided herein comprise at least one scFv domain, which, while not naturally occurring, generally includes a variable heavy domain and a variable light domain, linked together by a scFv linker. As outlined herein, while the scFv domain is generally from N- to C-terminus oriented as VH-scFv linker-VL, this can be reversed for any of the scFv domains (or those constructed using vh and vl sequences from Fabs), to VL-scFv linker-VH, with optional linkers at one or both ends depending on the format.

[0238] By “modification” or “variant” herein is meant an amino acid substitution, insertion, and/or deletion in a polypeptide sequence or an alteration to a moiety chemically linked to a protein. For example, a modification may be an altered carbohydrate or PEG structure attached to a protein. By “amino acid modification” herein is meant an amino acid substitution, insertion, and/or deletion in a polypeptide sequence. For clarity, unless otherwise noted, the amino acid modification is always to an amino acid coded for by DNA, e.g., the 20 amino acids that have codons in DNA and RNA.

[0239] By “amino acid substitution” or “substitution” herein is meant the replacement of an amino acid at a particular position in a parent polypeptide sequence with a different amino acid. In particular, in some embodiments, the substitution is to an amino acid that is not naturally occurring at the particular position, either not naturally occurring within the organism or in any organism. For example, the substitution E272Y refers to a variant polypeptide, in this case an Fc variant, in which the glutamic acid at position 272 is replaced with tyrosine. For clarity, a protein which has been engineered to change the nucleic acid coding sequence but not change the starting amino acid (for example exchanging CGG (encoding arginine) to CGA (still encoding arginine) to increase host organism expression levels) is not an “amino acid substitution;” that is, despite the creation of a new gene encoding the same protein, if the protein has the same amino acid at the particular position that it started with, it is not an amino acid substitution.

[0240] By “amino acid insertion” or “insertion” as used herein is meant the addition of an amino acid sequence at a particular position in a parent polypeptide sequence. For example,—233E or 233E designates an insertion of glutamic acid after position 233 and before position 234. Additionally,—233ADE or A233ADE designates an insertion of AlaAspGlu after position 233 and before position 234.

[0241] By “amino acid deletion” or “deletion” as used herein is meant the removal of an amino acid sequence at a particular position in a parent polypeptide sequence. For example, E233- or E233 #, E233( ) or E233del designates a deletion of glutamic acid at position 233. Additionally, EDA233- or EDA233 #designates a deletion of the sequence GluAspAla that begins at position 233.

[0242] By “variant protein” or “protein variant”, or “variant” as used herein is meant a protein that differs from that of a parent protein by virtue of at least one amino acid modification. The protein variant has at least one amino acid modification compared to the parent protein, yet not so many that the variant protein will not align with the parental protein using an alignment program such as that described below. In general, variant proteins (such as variant Fc domains, etc., outlined herein, are generally at least 75, 80, 85, 90, 91, 92, 93, 94, 95, 96, 97, 98 or 99% identical to the parent protein, using the alignment programs described below, such as BLAST.

[0243] “Variant” as used herein also refers to particular amino acid modifications that confer particular function (e.g., a “heterodimerization variant,” “pI variant,” “ablation variant,” etc.).

[0244] As described below, in some embodiments the parent polypeptide, for example an Fc parent polypeptide, is a human wild-type sequence, such as the heavy constant domain or Fc region from IgG1, IgG2, IgG3 or IgG4, although human sequences with variants can also serve as “parent polypeptides”, for example the IgG1/2 hybrid of US Publication 2006/0134105 can be included. The protein variant sequence herein will preferably possess at least about 80% identity with a parent protein sequence, and most preferably at least about 90% identity, more preferably at least about 95-98-99% identity. Accordingly, by “antibody variant” or “variant antibody” as used herein is meant an antibody that differs from a parent antibody by virtue of at least one amino acid modification, “IgG variant” or “variant IgG” as used herein is meant an antibody that differs from a parent IgG (again, in many cases, from a human IgG sequence) by virtue of at least one amino acid modification, and “immunoglobulin variant” or “variant immunoglobulin” as used herein is meant an immunoglobulin sequence that differs from that of a parent immunoglobulin sequence by virtue of at least one amino acid modification. “Fc variant” or “variant Fc” as used herein is meant a protein comprising an amino acid modification in an Fc domain as compared to an Fc domain of human IgG1, IgG2 or IgG4.

[0245] “Fc variant” or “variant Fc” as used herein is meant a protein comprising an amino acid modification in an Fc domain. The modification can be an addition, deletion, or substitution. The Fc variants are defined according to the amino acid modifications that compose them. Thus, for example, N434S or 434S is an Fc variant with the substitution for serine at position 434 relative to the parent Fc polypeptide, wherein the numbering is according to the EU index. Likewise, M428L/N434S defines an Fc variant with the substitutions M428L and N434S relative to the parent Fc polypeptide. The identity of the WT amino acid may be unspecified, in which case the aforementioned variant is referred to as 428L/434S. It is noted that the order in which substitutions are provided is arbitrary, that is to say that, for example, 428L/434S is the same Fc variant as 434S/428L, and so on. For all positions discussed herein that relate to antibodies or derivatives and fragments thereof (e.g., Fc domains), unless otherwise noted, amino acid position numbering is according to the EU index. The “EU index” or “EU index as in Kabat” or “EU numbering” scheme refers to the numbering of the EU antibody (Edelman et al., 1969, Proc Natl Acad Sci USA 63:78-85, hereby entirely incorporated by reference). The modification can be an addition, deletion, or substitution.

[0246] In general, variant Fc domains have at least about 80, 85, 90, 95, 97, 98 or 99 percent identity to the corresponding parental human IgG Fc domain (using the identity algorithms discussed below, with one embodiment utilizing the BLAST algorithm as is known in the art, using default parameters). Alternatively, the variant Fc domains can have from 1, 2, 3, 4, 5, 6, 7, 8, 9, 10, 11, 12, 13, 14, 15, 16, 11, 12, 13, 14, 15, 16, 17, 18, 19 or 20 amino acid modifications as compared to the parental Fc domain. Alternatively, the variant Fc domains can have up to 1, 2, 3, 4, 5, 6, 7, 8, 9, 10, 11, 12, 13, 14, 15, 16, 11, 12, 13, 14, 15, 16, 17, 18, 19 or 20 amino acid modifications as compared to the parental Fc domain. Additionally, as discussed herein, the variant Fc domains described herein still retain the ability to form a dimer with another Fc domain as measured using known techniques as described herein, such as non-denaturing gel electrophoresis.

[0247] By “protein” as used herein is meant at least two covalently attached amino acids, which includes proteins, polypeptides, oligopeptides and peptides. In addition, polypeptides that make up the antibodies of the invention may include synthetic derivatization of one or more side chains or termini, glycosylation, PEGylation, circular permutation, cyclization, linkers to other molecules, fusion to proteins or protein domains, and addition of peptide tags or labels.

[0248] By “residue” as used herein is meant a position in a protein and its associated amino acid identity. For example, Asparagine 297 (also referred to as Asn297 or N297) is a residue at position 297 in the human antibody IgG1.

[0249] By “IgG subclass modification” or “isotype modification” as used herein is meant an amino acid modification that converts one amino acid of one IgG isotype to the corresponding amino acid in a different, aligned IgG isotype. For example, because IgG1 comprises a tyrosine and IgG2 a phenylalanine at EU position 296, a F296Y substitution in IgG2 is considered an IgG subclass modification.

[0250] By “non-naturally occurring modification” as used herein is meant an amino acid modification that is not isotypic. For example, because none of the human IgGs comprise a serine at position 434, the substitution 434S in IgG1, IgG2, IgG3, or IgG4 (or hybrids thereof) is considered a non-naturally occurring modification.

[0251] By “amino acid” and “amino acid identity” as used herein is meant one of the 20 naturally occurring amino acids that are coded for by DNA and RNA.

[0252] By “effector function” as used herein is meant a biochemical event that results from the interaction of an antibody Fc region with an Fc receptor or ligand. Effector functions include but are not limited to ADCC, ADCP, and CDC.

[0253] By “IgG Fc ligand” as used herein is meant a molecule, preferably a polypeptide, from any organism that binds to the Fc region of an IgG antibody to form an Fc/Fc ligand complex. Fc ligands include but are not limited to FcγRIs, FcγRIIs, FcγRIIIs, FcRn, Clq, C3, mannan binding lectin, mannose receptor, staphylococcal protein A, streptococcal protein G, and viral FcγR. Fc ligands also include Fc receptor homologs (FcRH), which are a family of Fc receptors that are homologous to the FcγRs (Davis et al., 2002, Immunological Reviews 190:123-136, entirely incorporated by reference). Fc ligands may include undiscovered molecules that bind Fc. Particular IgG Fc ligands are FcRn and Fc gamma receptors. By “Fc ligand” as used herein is meant a molecule, preferably a polypeptide, from any organism that binds to the Fc region of an antibody to form an Fc/Fc ligand complex.

[0254] By “Fc gamma receptor”, “FcγR” or “FcgammaR” as used herein is meant any member of the family of proteins that bind the IgG antibody Fc region and is encoded by an FcγR gene. In humans this family includes but is not limited to FcγRI (CD64), including isoforms FcγRIa, FcγRIb, and FcγRIc; FcγRII (CD32), including isoforms FcγRIIa (including allotypes H131 and R131), FcγRIIb (including FcγRIIb-1 and FcγRIIb-2), and FcγRIIc; and FcγRIII (CD16), including isoforms FcγRIIIa (including allotypes V158 and F158) and FcγRIIIb (including allotypes FcγRIIb-NA1 and FcγRIIb-NA2) (Jefferis et al., 2002, Immunol Lett 82:57-65, entirely incorporated by reference), as well as any undiscovered human FcγRs or FcγR isoforms or allotypes. An FcγR may be from any organism, including but not limited to humans, mice, rats, rabbits, and monkeys. Mouse FcγRs include but are not limited to FcγRI (CD64), FcγRII (CD32), FcγRIII (CD16), and FcγRIII-2 (CD16-2), as well as any undiscovered mouse FcγRs or FcγR isoforms or allotypes.

[0255] By “FcRn” or “neonatal Fc Receptor” as used herein is meant a protein that binds the IgG antibody Fc region and is encoded at least in part by an FcRn gene. The FcRn may be from any organism, including but not limited to humans, mice, rats, rabbits, and monkeys. As is known in the art, the functional FcRn protein comprises two polypeptides, often referred to as the heavy chain and light chain. The light chain is beta-2-microglobulin and the heavy chain is encoded by the FcRn gene. Unless otherwise noted herein, FcRn or an FcRn protein refers to the complex of FcRn heavy chain with beta-2-microglobulin. A variety of FcRn variants used to increase binding to the FcRn receptor, and in some cases, to increase serum half-life. An “FcRn variant” is an amino acid modification that contributes to increased binding to the FcRn receptor, and suitable FcRn variants are shown below.

[0256] By “parent polypeptide” as used herein is meant a starting polypeptide that is subsequently modified to generate a variant. The parent polypeptide may be a naturally occurring polypeptide, or a variant or engineered version of a naturally occurring polypeptide. Accordingly, by “parent immunoglobulin” as used herein is meant an unmodified immunoglobulin polypeptide that is modified to generate a variant, and by “parent antibody” as used herein is meant an unmodified antibody that is modified to generate a variant antibody. It should be noted that “parent antibody” includes known commercial, recombinantly produced antibodies as outlined below. In this context, a “parent Fc domain” will be relative to the recited variant; thus, a “variant human IgG1 Fc domain” is compared to the parent Fc domain of human IgG1, a “variant human IgG4 Fc domain” is compared to the parent Fc domain human IgG4, etc.

[0257] By “position” as used herein is meant a location in the sequence of a protein. Positions may be numbered sequentially, or according to an established format, for example the EU index for numbering of antibody domains (e.g., a CH1, CH2, CH3 or hinge domain).

[0258] By “target antigen” as used herein is meant the molecule that is bound specifically by the antigen binding domain comprising the variable regions of a given antibody.

[0259] By “strandedness” in the context of the monomers of the heterodimeric antibodies of the invention herein is meant that, similar to the two strands of DNA that “match,” heterodimerization variants are incorporated into each monomer so as to preserve the ability to “match” to form heterodimers. For example, if some pI variants are engineered into monomer A (e.g., making the pI higher) then steric variants that are “charge pairs” that can be utilized as well do not interfere with the pI variants, e.g., the charge variants that make a pI higher are put on the same “strand” or “monomer” to preserve both functionalities. Similarly, for “skew” variants that come in pairs of a set as more fully outlined below, the skilled artisan will consider pI in deciding into which strand or monomer one set of the pair will go, such that pI separation is maximized using the pI of the skews as well.

[0260] By “target cell” as used herein is meant a cell that expresses a target antigen.

[0261] By “host cell” in the context of producing a bispecific antibody according to the invention herein is meant a cell that contains the exogeneous nucleic acids encoding the components of the bispecific antibody and is capable of expressing the bispecific antibody under suitable conditions. Suitable host cells are discussed below.

[0262] By “wild type,” “wild-type,” or “WT” herein is meant an amino acid sequence or a nucleotide sequence that is found in nature, including allelic variations. A WT protein has an amino acid sequence or a nucleotide sequence that has not been intentionally modified.

[0263] Provided herein are a number of antibody domains (e.g., Fc domains) that have sequence identity to human antibody domains. Sequence identity between two similar sequences (e.g., antibody variable domains) can be measured by algorithms such as that of Smith, T.F. & Waterman, M.S. (1981) “Comparison Of Biosequences,” Adv. Appl. Math. 2:482 [local homology algorithm]; Needleman, S.B. & Wunsch, CD. (1970) “A General Method Applicable To The Search For Similarities In The Amino Acid Sequence Of Two Proteins,” J. Mol. Biol.48:443 [homology alignment algorithm], Pearson, W.R. & Lipman, D.J. (1988) “Improved Tools For Biological Sequence Comparison,” Proc. Natl. Acad. Sci. (U.S.A.) 85:2444 [search for similarity method]; or Altschul, S. F. et al, (1990) “Basic Local Alignment Search Tool,” J. Mol. Biol. 215:403-10, the “BLAST” algorithm, see https://blast.ncbi.nlm.nih.gov/Blast.cgi. When using any of the aforementioned algorithms, the default parameters (for Window length, gap penalty, etc.) are used. In one embodiment, sequence identity is done using the BLAST algorithm, using default parameters

[0264] The antibodies of the present invention are generally isolated or recombinant. “Isolated,” when used to describe the various polypeptides disclosed herein, means a polypeptide that has been identified and separated and/or recovered from a cell or cell culture from which it was expressed. Ordinarily, an isolated polypeptide will be prepared by at least one purification step. An “isolated antibody,” refers to an antibody which is substantially free of other antibodies having different antigenic specificities. “Recombinant” means the antibodies are generated using recombinant nucleic acid techniques in exogeneous host cells, and they can be isolated as well.

[0265] “Specific binding” or “specifically binds to” or is “specific for” a particular antigen or an epitope means binding that is measurably different from a non-specific interaction. Specific binding can be measured, for example, by determining binding of a molecule compared to binding of a control molecule, which generally is a molecule of similar structure that does not have binding activity. For example, specific binding can be determined by competition with a control molecule that is similar to the target.

[0266] Specific binding for a particular antigen or an epitope can be exhibited, for example, by an antibody having a KD for an antigen or epitope of at least about 10⁻⁴ M, at least about 10⁻⁵ M, at least about 10⁻⁶ M, at least about 10⁻⁷ M, at least about 10⁻⁸ M, at least about 10⁻⁹ M, alternatively at least about 10⁻¹⁰ M, at least about 10⁻¹¹ M, at least about 10⁻¹² M, or greater, where KD refers to a dissociation rate of a particular antibody-antigen interaction. Typically, an antibody that specifically binds an antigen will have a KD that is 20-, 50-, 100-, 500-, 1000-, 5,000-, 10,000- or more times greater for a control molecule relative to the antigen or epitope.

[0267] Also, specific binding for a particular antigen or an epitope can be exhibited, for example, by an antibody having a KA or Ka for an antigen or epitope of at least 20-, 50-, 100-, 500-, 1000-, 5,000-, 10,000- or more times greater for the epitope relative to a control, where KA or Ka refers to an association rate of a particular antibody-antigen interaction. Binding affinity is generally measured using a Biacore, SPR or BLI assay.

IV. Anti-CD28 xAnti-STEAP1 Antibodies

[0268] In one aspect, provided herein are novel anti-CD28 x anti-STEAP1 antibodies In some embodiments, the anti-CD28 x anti-STEAP1 antibodies described herein are capable of agonistically binding to CD28 costimulatory molecules on T cells and STEAP1 on tumor cells. Such antibodies selectively enhance anti-tumor activity at STEAP1 -associated tumor sites while minimizing peripheral toxicity. The subject antibodies provided herein are particularly useful in combination with other anti-cancer therapies, including, for example, bispecific antibodies for the treatment of STEAP1 -associated cancers.

[0269] The anti-CD28 x anti-STEAP1 antibodies are multivalent and include at least two antigen binding domains (ABDs), wherein at least one antigen binding domain is a CD28 binding domain and at least one antigen binding domain is a STEAP1 binding domain. Any suitable CD28 binding domain and STEAP1 binding domain can be included in the subject anti-CD28 x anti-STEAP1 antibodies, including, for example, the CD28 binding domains and STEAP1 binding domains provided herein.

[0270] The antigen binding domains provided herein generally include a variable heavy domain (VH) having a VH-CDR1, VH-CDR-2, and VH-CDR-3; and a variable light domain (VL), and a variable light domain (VL) having a VL-CDR1, VL-CDR-2, and VL-CDR-3.

[0271] In addition, as discussed above, the numbering used in the sequence listing and figures for the identification of the CDRs is Kabat, however, different numbering can be used, which will change the amino acid sequences of the CDRs as shown in Table 2.

[0272] For all of the variable heavy and light domains listed herein, further variants can be made. As outlined herein, in some embodiments the set of 6 CDRs can have from 0, 1, 2, 3, 4 or 5 amino acid modifications (with amino acid substitutions finding particular use), as well as changes in the framework regions of the variable heavy and light domains, as long as the frameworks (excluding the CDRs) retain at least about 80, 85, 90, 95 or 99% identity to a human germline sequence selected from those listed in FIG. 1 of U.S. Pat. No. 7,657,380, which Figure and Legend is incorporated by reference in its entirety herein. Thus, for example, the identical CDRs as described herein can be combined with different framework sequences from human germline sequences, as long as the framework regions retain at least 80, 85 or 90% identity to a human germline sequence selected from those listed in FIG. 1 of U.S. Pat. No. 7,657,380. Alternatively, the CDRs can have amino acid modifications (e.g., from 1, 2, 3, 4 or 5 amino acid modifications in the set of CDRs (that is, the CDRs can be modified as long as the total number of changes in the set of 6 CDRs is less than 6 amino acid modifications, with any combination of CDRs being changed; e.g., there may be one change in vlCDR1, two in vhCDR2, none in vhCDR3, etc.)), as well as having framework region changes, as long as the framework regions retain at least 80, 85, 95 to 99% identity to a human germline sequence selected from those listed in FIG. 1 of U.S. Pat. No. 7,657,380.

[0273] As will be appreciated by those in the art, any set of 6 CDRs or VH and VL domains can be in the scFv format or in the Fab format, which is then added to the heavy and light constant domains, where the heavy constant domains comprise variants (including within the CH1 domain as well as the Fc domain).

[0274] In addition, in embodiments wherein the subject antibody includes an scFv, the scFv can be in an orientation from N- to C-terminus ofVH-scFv linker-VL or VL-scFv linker-VH. In some formats, one or more of the ABDs generally is a Fab that includes a VH domain on one protein chain (generally as a component of a heavy chain) and a VL on another protein chain (generally as a component of a light chain). Exemplary scFv linkers for use in the subject antibodies are depicted in FIG. 6.

[0275] In some embodiments, the anti-CD28 x anti-STEAP1 antibody is a bispecific antibody. In some embodiments, the anti-CD28 x anti-STEAP1 antibody is a bivalent antibody. In some embodiments, the anti-CD28 x anti-STEAP1 antibody is a trivalent antibody. In some embodiments, the anti-CD28 x anti-STEAP1 antibody is a bispecific, bivalent antibody. In some embodiments, the anti-CD28 x anti-STEAP1 antibodies include one CD28 binding domain and one STEAP1 binding domain. In exemplary embodiments, the anti-CD28 x anti-STEAP1 antibody is a bispecific, trivalent antibody. In some embodiments, the anti-CD28 x anti-STEAP1 antibodies include one CD28 binding domain and two STEAP1 binding domains.

[0276] The anti-CD28 x anti-STEAP1 antibodies provided herein can be in any useful format, including, including, for example, canonical immunoglobulin, as well as the “1+1 Fab-scFv-Fc,” “2+1 “mAb-scFv,” “2+1 Fab2-scFv-Fc,” and “2+1 Fab2-Fc x scFv-Fc” formats described herein (FIG. 14). Additional useful formats include, but are not limited to: “mAb-Fv,” “central-Fv,” “one-armed scFv-mAb,” “scFv-mAb,” “dual scFv,” and “trident” formats provided herein (see, e.g., FIG. 14). See also, US20180127501A1, which is incorporated by reference herein, particularly in pertinent part relating to antibody formats (see, e.g., FIG. 2). In some embodiments, the anti-CD28 x anti-STEAP1 antibodies are heterodimeric bispecific antibodies that include variant Fc domains having any of the heterodimerization skew variants, pI variants and/or ablation variants described herein. See, e.g. FIG. 8.

[0277] Note that unless specified herein, the order of the antigen list in the name does not confer structure; that is an anti-STEAP1 x anti-CD28 1+1 Fab-scFv-Fc antibody can have the scFv bind to STEAP1 or CD28, although in some cases, the order specifies structure as indicated.

[0278] The anti-CD28 x anti-STEAP1 antibodies provided herein further include different antibody domains. As described herein and known in the art, the antibodies described herein include different domains within the heavy and light chains, which can be overlapping as well. These domains include, but are not limited to, the Fc domain, the CH1 domain, the CH2 domain, the CH3 domain, the hinge domain, the heavy constant domain (CHT-hinge-Fc domain or CHT-hinge-CH2-CH3), the variable heavy domain, the variable light domain, the light constant domain, Fab domains and scFv domains.

[0279] As shown herein, there are a number of suitable linkers (for use as either domain linkers or scFv linkers) that can be used to covalently attach the recited domains (e.g., scFvs, Fabs, Fc domains, VH domains, VL domains, etc.), including traditional peptide bonds, generated by recombinant techniques. Exemplary linkers to attach domains of the subject antibody to each other are depicted in FIG. 7. In some embodiments, the linker peptide may predominantly include the following amino acid residues: Gly, Ser, Ala, or Thr.

[0280] The linker peptide should have a length that is adequate to link two molecules in such a way that they assume the correct conformation relative to one another so that they retain the desired activity. In one embodiment, the linker is from about 1 to 50 amino acids in length, preferably about 1 to 30 amino acids in length. In one embodiment, linkers of 1 to 20 amino acids in length may be used, with from about 5 to about 10 amino acids finding use in some embodiments. Useful linkers include glycine-serine polymers, including for example (GS)n, (GSGGS)n (SEQ ID NO: 2684), (GGGGS)n (SEQ ID NO: 36), and (GGGS)n (SEQ ID NO: 2685), where n is an integer of at least one (and generally from 3 to 4), glycine-alanine polymers, alanine-serine polymers, and other flexible linkers. Alternatively, a variety of nonproteinaceous polymers, including but not limited to polyethylene glycol (PEG), polypropylene glycol, polyoxyalkylenes, or copolymers of polyethylene glycol and polypropylene glycol, may find use as linkers.

[0281] Other linker sequences may include any sequence of any length of CL/CH1 domain but not all residues of CL/CH1 domain; for example, the first 5-12 amino acid residues of the CL/CH1 domains. Linkers can be derived from immunoglobulin light chain, for example Cκ or Cλ. Linkers can be derived from immunoglobulin heavy chains of any isotype, including for example Cγ1, Cγ2, Cγ3, Cγ4, Cα1, Cα2, Cδ, Cε, and Cμ. Linker sequences may also be derived from other proteins such as Ig-like proteins (e.g., TCR, FcR, KIR), hinge region-derived sequences, and other natural sequences from other proteins.

[0282] In some embodiments, the linker is a “domain linker,” used to link any two domains as outlined herein together. For example, in the 2+1 Fab2-scFv-Fc format, there may be a domain linker that attaches the C-terminus of the CH1 domain of the Fab to the N-terminus of the scFv, with another optional domain linker attaching the C-terminus of the scFv to the CH2 domain (although in many embodiments the hinge is used as this domain linker). While any suitable linker can be used, many embodiments utilize a glycine-serine polymer as the domain linker, including for example (GS)n, (GSGGS)n (SEQ ID NO: 2684), (GGGGS)n (SEQ ID NO: 36), and (GGGS)n (SEQ ID NO: 2685), where n is an integer of at least one (and generally from 3 to 4 to 5) as well as any peptide sequence that allows for recombinant attachment of the two domains with sufficient length and flexibility to allow each domain to retain its biological function. In some cases, and with attention being paid to “strandedness,” as outlined below, charged domain linkers, as used in some embodiments of scFv linkers can be used. Exemplary useful domain linkers are depicted in FIG. 7.

[0283] In some embodiments, the linker is a scFv linker that is used to covalently attach the VH and VL domains as discussed herein. In many cases, the scFv linker is a charged scFv linker, a number of which are shown in FIG. 6. Accordingly, provided herein are charged scFv linkers, to facilitate the separation in pI between a first and a second monomer. That is, by incorporating a charged scFv linker, either positive or negative (or both, in the case of scaffolds that use scFvs on different monomers), this allows the monomer comprising the charged linker to alter the pI without making further changes in the Fc domains. These charged linkers can be substituted into any scFv containing standard linkers.

[0284] Again, as will be appreciated by those in the art, charged scFv linkers are used on the correct “strand” or monomer, according to the desired changes in pI. For example, as discussed herein, to make 1+1 Fab-scFv-Fc format heterodimeric antibody, the original pI of the Fv region for each of the desired antigen binding domains are calculated, and one is chosen to make an scFv, and depending on the pI, either positive or negative linkers are chosen.

[0285] Charged domain linkers can also be used to increase the pI separation of the monomers of the invention as well, and thus those included in FIGS. 6 and 7 can be used in any embodiment herein where a linker is utilized.

[0286] Exemplary subject anti-CD28 x anti-STEAP1 antibodies are depicted, for example, in FIG. 24. During the cell culture production of the anti-CD28 x anti-STEAP1 antibodies provided herein, the C-terminal lysine residue or C-terminal lysine and glycine residues may be cleaved from the heavy chain monomers, thereby leading to variants with C-terminal “clipping.” See, e.g., Jiang et al., Journal of Pharmaceutical Sciences 105:2066-2072 (2016). Thus, in some embodiments provided herein, the anti-CD28 x anti-STEAP1 antibody is a variant of one of the anti-CD28 x anti-STEAP1 antibodies includes a deletion of a C-terminal lysine (-K) terminal or C-terminal lysine and glycine (-GK) residues in one or both Fc domains of an anti-CD28 x anti-STEAP1 antibody described herein. In some embodiments, the deletion is G446del and/or K447del (EU numbering).

[0287] Aspects of the anti-CD28 x anti-STEAP1 antibodies are further described in detail below.

[0288] A. CD28 Binding Domains

[0289] The anti-CD28 x anti-STEAP1 antibodies provided herein include at least one CD28 binding domain. Any suitable CD28 binding domain can be included in the anti-CD28 x anti-STEAP1 antibodies provided herein. In exemplary embodiments, the CD28 binding domain is an agonistic CD28 ABDs that advantageously provide T cell costimulatory activity.

[0290] As will be appreciated by those in the art, suitable CD28 binding domains can comprise a set of 6 CDRs as depicted in the figures, either as they are underlined or, in the case where a different numbering scheme is used, as described herein and as shown in Table 2, as the CDRs that are identified using other alignments within the variable heavy (VH) domain and variable light domain (VL) sequences of those CD28 binding domains depicted in FIGS. 15, 18, and 21. Additional VH and VL sequences of exemplary CD28 binding domains that can be used in the subject antibodies are depicted in FIGS. 16 and 17. Suitable CD28 ABDs can also include the entire VH and VL sequences as depicted in these sequences and figures, used as scFvs or as Fabs.

[0291] In one embodiment, the CD28 antigen binding domain includes the 6 CDRs (i.e., vhCDR1-3 and vlCDR1-3) of any of the CD28 binding domains described herein, including, but not limited to those depicted in FIGS. 15, 18, 21 and 65. In some embodiments, the CD28 ABD that binds human CD28 is one of the following CD28 ABDs: 1A7[CD28]_H1L1, 1A7[CD28]_H1.1_L1, IA7[CD28]_H1_L1.71, IA7[CD28]_H1.1_L1.71, IA7[CD28]H1.14_L1, IA7[CD28]_H1.14_L1.71, CD28.3[CD28]_H0L0, hCD28.3[CD28]_H1L1, 5.11A1[CD28]_H0L0, TGN1412_H1L1, 341VL34[CD28]H1L1, 341VL36[CD28]_H1L1, 281VL4[CD28]_H1L1, HuTN228[CD28]_H1L1, PV1[CD28]H0L0, m9.3[CD28]_H0L0, hu9.3[CD28]_H1L1, 9G2[CD28]_H0L0, 9G2[CD28]_H1L1, 2F10A3.140[CD28]_H1L1, TN228[CD28]_H4L2, 1A7[CD28]_H1.1_L1 [S-S], 1A7[CD28]_H1_L1.71 [S-S], 1A7[CD28]_H1.1_L1.71 [S-S], IA7[CD28]_H1.14_L1 [S-S], IA7[CD28]_H1.14_L1.71 [S-S], IA7[CD28]_H1.129_L1.71 [S-S], 1A7[CD28]_H1.106_L1.71 [S-S], 1A7[CD28]_H1.129_L1 [S-S], and IA7[CD28]_H1.106_L1 [S-S](FIGS. 15, 18, 21 and 65). In some embodiments, the CD28 ABD includes a VH/VL pair selected from the VHs and VLs depicted in FIGS. 15, 16, 17, and 82.

[0292] In addition to the parental CDR sets disclosed in the figures and sequence listing that form an ABD to CD28, provided herein are variant CD28 ABDS having CDRs that include at least one modification of the CD28 ABD CDRs disclosed herein (e.g., (FIGS. 15, 18, 21 and 65, and the sequence listing). In one embodiment, the CD28 ABD of the subject anti-CD28 x anti-STEAP1 antibody includes a set of 6 CDRs with 1, 2, 3, 4, 5, 6, 7, 8, 9, 10 amino acid modifications as compared to the 6 CDRs of a CD28 ABD as described herein, including the figures and sequence listing. In exemplary embodiments, the CD28 ABD of the subject anti-CD28 x anti-STEAP1 antibody includes a set of 6 CDRs with 1, 2, 3, 4, 5, 6, 7, 8, 9, 10 amino acid modifications as compared to the 6 CDRs of one of the following CD28 ABDs: 1A7[CD28]_H1L1, 1A7[CD28]_H1.1_L1, IA7[CD28]_H1_L1.71, IA7[CD28]_H1.1_L1.71, IA7[CD28]H1.14_L1, IA7[CD28]_H1.14_L1.71, CD28.3[CD28]_H0L0, hCD28.3[CD28]_H1L1, 5.11A1[CD28]_H0L0, TGN1412_H1L1, 341VL34[CD28]H1L1, 341VL36[CD28]_H1L1, 281VL4[CD28]_H1L1, HuTN228[CD28]_H1L1, PV1[CD28]H0L0, m9.3[CD28]_H0L0, hu9.3[CD28]_H1L1, 9G2[CD28]_H0L0, 9G2[CD28]_H1L1, 2F10A3.140[CD28]_H1L1, TN228[CD28]_H4L2, 1A7[CD28]_H1.1_L1 [S-S], 1A7[CD28]_H1_L1.71 [S-S], 1A7[CD28]_H1.1_L1.71 [S-S], 1A7[CD28]_H1.14_L1 [S-S], 1A7[CD28]_H1.14_L1.71 [S-S], 1A7[CD28]_H1.129_L1.71 [S-S], 1A7[CD28]_H1.106_L1.71 [S-S], 1A7[CD28]_H1.129_L1 [S-S], and 1A7[CD28]_H1.106_L1 [S-S](FIGS. 15, 18, 21 and 65). In certain embodiments, the CD28 ABD of the subject anti-CD28 x anti-STEAP1 antibody is capable of binding CD28 antigen, as measured by at least one of a Biacore, surface plasmon resonance (SPR), flow cytometry, and/or BLI (biolayer interferometry, e.g., Octet assay) assay, with the latter finding particular use in many embodiments. In particular embodiments, the CD28 ABD is capable of binding human CD28 antigen (see FIG. 1).

[0293] In some embodiments, the CD28 ABD of the subject anti-CD28 x anti-STEAP1 antibody includes 6 CDRs that are at least 90, 95, 97, 98 or 99% identical to the 6 CDRs of a CD28 ABD as described herein, including the figures and sequence listing. In exemplary embodiments, the CD28 ABD of the subject anti-CD28 x anti-STEAP1 antibody includes 6 CDRs that are at least 90, 95, 97, 98 or 99% identical to the 6 CDRs of one of the following CD28 ABDs: IA7[CD28]_H1L1, IA7[CD28]_H1.1_L1, IA7[CD28]_H1iL1.71, IA7[CD28]_H1.1_L1.71, IA7[CD28]H1.14_L1, IA7[CD28]_H1.14_L1.71, CD28.3[CD28]_H0L0, hCD28.3[CD28]_H1L1, 5.11A1[CD28]_H0L0, TGN1412_H1L1, 341VL34[CD28]_H1L1, 341VL36[CD28]_H1L1, 281VL4[CD28]_H1L1, HuTN228[CD28]_H1L1, PV1[CD28]H0L0, m9.3[CD28]_H0L0, hu9.3[CD28]_H1L1, 9G2[CD28]_H0L0, 9G2[CD28]_H1L1, 2F10A3.140[CD28]_H1L1, TN228[CD28]_H4L2, IA7[CD28]_H1.1_L1 [S-S], IA7[CD28]_H1_L1.71 [S-S], IA7[CD28]_H1.1_L1.71 [S-S], IA7[CD28]_H1.14_L1 [S-S], IA7[CD28]_H1.14_L1.71 [S-S], IA7[CD28]_H1.129_L1.71 [S-S], 1A7[CD28]_H1.106_L1.71 [S-S], 1A7[CD28]_H1.129_L1 [S-S], and IA7[CD28]_H1.106_L1 [S-S](FIGS. 15, 18, 21 and 65). In certain embodiments, the CD28 ABD is capable of binding to the CD28, as measured by at least one of a Biacore, surface plasmon resonance (SPR), flow cytometry, and/or BLI (biolayer interferometry, e.g., Octet assay) assay, with the latter finding particular use in many embodiments. In particular embodiments, the CD28 ABD is capable of binding human CD28 antigen (see FIG. 1).

[0294] In another exemplary embodiment, the CD28 ABD of the subject anti-CD28 x anti-STEAP1 antibody includes the variable heavy (VH) domain and variable light (VL) domain of any one of the CD28 ABDs described herein, including the figures and sequence listing. In exemplary embodiments, the CD28 ABD is one of the following CD28 ABDs: IA7[CD28]_H1L1, IA7[CD28]_H1.1_L1, IA7[CD28]_H1_L1.71, IA7[CD28]_H1.1_L1.71, IA7[CD28]H1.14_L1, IA7[CD28]_H1.14_L1.71, CD28.3[CD28]_H0L0, hCD28.3[CD28]_H1L1, 5.11A1[CD28]_H0L0, TGN1412_H1L1, 341VL34[CD28]_H1L1, 341VL36[CD28]_H1L1, 281VL4[CD28]_H1L1, HuTN228[CD28]_H1L1, PV1[CD28]H0L0, m9.3[CD28]_H0L0, hu9.3[CD28]_H1L1, 9G2[CD28]_H0L0, 9G2[CD28]_H1L1, 2F10A3.140[CD28]_H1L1, TN228[CD28]_H4L2, IA7[CD28]_H1.1_L1 [S-S], IA7[CD28]_H1_L1.71 [S-S], IA7[CD28]_H1.1_L1.71 [S-S], IA7[CD28]_H1.14_L1 [S-S], IA7[CD28]_H1.14_L1.71 [S-S], IA7[CD28]_H1.129_L1.71 [S-S], 1A7[CD28]_H1.106_L1.71 [S-S], 1A7[CD28]_H1.129_L1 [S-S], and IA7[CD28]_H1.106_L1 [S-S](FIGS. 15, 18, 21 and 65). In some embodiments, the CD28 ABD includes a VH and VL pair selected from the VH and VLs depicted in FIGS. 15, 16, 17, and 82.

[0295] In some embodiments, the anti-CD28 x anti-STEAP1 antibody includes a CD28 ABD that includes a variable heavy domain and/or a variable light domain that are variants of a CD28 ABD VH and VL domain disclosed herein. In one embodiment, the variant VH domain and/or VL domain has from 1, 2, 3, 4, 5, 6, 7, 8, 9 or 10 amino acid changes from a VH and/or VL domain of a CD28 ABD described herein, including the figures and sequence listing. In exemplary embodiments, the variant VH domain and/or VL domain has from 1, 2, 3, 4, 5, 6, 7, 8, 9 or 10 amino acid changes from a VH and/or VL domain of one of the following CD28 ABDs: IA7[CD28]_H1L1, IA7[CD28]_H1.1_L1, IA7[CD28]_H1_L1.71, IA7[CD28]_H1.1_L1.71, IA7[CD28]_H1.14_L1, IA7[CD28]_H1.14_L1.71, CD28.3[CD28]_H0L0, hCD28.3[CD28]_H1L1, 5.11A1[CD28]_H0L0, TGN1412_H1L1, 341VL34[CD28]_H1L1, 341VL36[CD28]_H1L1, 281VL4[CD28]_H1L1, HuTN228[CD28]H1L1, PV1[CD28]H0L0, m9.3[CD28]_H0L0, hu9.3[CD28]_H1L1, 9G2[CD28]_H0L0, 9G2[CD28]_H1L1, 2F10A3.140[CD28]_H1L1, TN228[CD28]_H4L2, IA7[CD28]_H1.1_L1 [S-S], IA7[CD28]_H1_L1.71 [S-S], IA7[CD28]_H1.1_L1.71 [S-S], IA7[CD28]_H1.14_L1 [S-S], IA7[CD28]_H1.14_L1.71 [S-S], 1A7[CD28]_H1.129_L1.71 [S-S], 1A7[CD28]_H1.106_L1.71 [S-S], 1A7[CD28]_H1.129_L1 [S-S], and 1A7[CD28]_H1.106_L1 [S-S](FIGS. 15, 18, 21 and 65). In some embodiments, the changes are in a VH domain depicted in FIGS. 15, 18, 21 and 65. In some embodiments, the changes are in a VL domain are depicted in FIGS. 15, 18, 21 and 65. In some embodiments, the changes are in a VH and VL domain are depicted in FIGS. 15, 18, 21 and 65. In some embodiments, the one or more amino acid changes are in the VH and/or VL framework regions (FR1, FR2, FR3, and/or FR4). In some embodiments, the one or more amino acid change(s) are in one or more CDRs. In certain embodiments, the CD28 ABD is capable of binding to CD28, as measured by at least one of a Biacore, surface plasmon resonance (SPR), flow cytometry, and/or BLI (biolayer interferometry, e.g., Octet assay) assay, with the latter finding particular use in many embodiments. In particular embodiments, the CD28 ABD is capable of binding human CD28 antigen (see FIG. 1).

[0296] In one embodiment, the variant VH and/or VL domain is at least 90, 95, 97, 98 or 99% identical to the VH and/or VL of a CD28 ABD as described herein, including the figures and sequence listing. In exemplary embodiments, the variant VH and/or VL domain is at least 90, 95, 97, 98 or 99% identical to the VH and/or VL of one of the following CD28 ABDs: IA7[CD28]_H1L1, IA7[CD28]H1.1_L1, IA7[CD28]_H1_L1.71, IA7[CD28]_H1.1_L1.71, IA7[CD28]H1.14_L1, IA7[CD28]_H1.14_L1.71, CD28.3[CD28]_H0L0, hCD28.3[CD28]_H1L1, 5.11A1[CD28]_H0L0, TGN1412_H1L1, 341VL34[CD28]_H1L1, 341VL36[CD28]_H1L1, 281VL4[CD28]_H1L1, HuTN228[CD28]_H1L1, PV1[CD28]H0L0, m9.3[CD28]_H0L0, hu9.3[CD28]_H1L1, 9G2[CD28]_H0L0, 9G2[CD28]_H1L1, 2F10A3.140[CD28]_H1L1, TN228[CD28]_H4L2, IA7[CD28]_H1.1_L1 [S-S], IA7[CD28]_H1_L1.71 [S-S], IA7[CD28]_H1.1_L1.71 [S-S], IA7[CD28]_H1.14_L1 [S-S], IA7[CD28]_H1.14_L1.71 [S-S], IA7[CD28]_H1.129_L1.71 [S-S], 1A7[CD28]_H1.106_L1.71 [S-S], 1A7[CD28]_H1.129_L1 [S-S], and IA7[CD28]_H1.106_L1 [S-S](FIGS. 15, 18, 21 and 65). In some embodiments, the CD28 ABD includes a VH that is at least 90, 95, 97, 98 or 99% identical to VH domain depicted in FIGS. 15-18, 21 and 65. In some embodiments, the CD28 ABD includes a VL that is at least 90, 95, 97, 98 or 99% identical to VL domain depicted in FIGS. 15-18 and 21. In some embodiments, the CD28 ABD includes a VH and a VL that is at least 90, 95, 97, 98 or 99% identical to a VH domain and a VL domain depicted in FIGS. 15-18, 21 and 65. In certain embodiments, the CD28 ABD is capable of binding to CD28, as measured by at least one of a Biacore, surface plasmon resonance (SPR), flow cytometry, and/or BLI (biolayer interferometry, e.g., Octet assay) assay, with the latter finding particular use in many embodiments. In particular embodiments, the CD28 ABD is capable of binding human CD28 antigen (see FIG. 1).

[0297] In some embodiments, the CD28 binding domain of the subject anti-CD28 x anti-STEAP1 antibody includes a VH that includes any one of the VHCDRI-3 or HFR1-4 sequences depicted in FIG. 19A. In some embodiments, the CD28 binding domain includes a VL that includes any one of the VLCDRI-3 or LFR1-4 sequences depicted in FIG. 19B.

[0298] In some embodiments, the anti-CD28 x anti-STEAP1 antibody includes a CD28 binding domain that includes a VH and VL selected from the following:(i) a VH comprising a vhCDR1, a vhCDR2, and a vhCDR3 having an amino acid sequence of a vhCDR1, a vhCDR2, and a vhCDR3, respectively, of a VH of any of the CD28 binding domains depicted in FIGS. 15, 18, 21 and 65 or a variant thereof; and (ii) a VL comprising a vlCDR1, a vlCDR2, and a vlCDR3 having an amino acid sequence of a vlCDR1, a vlCDR2, and a vlCDR3, respectively, of the VL of the CD28 binding domains depicted in FIGS. 15, 18, 21 and 65 or a variant thereof; or(i) a VH comprising a vhCDR1, a vhCDR2, and a vhCDR3 having an amino acid sequence of a vhCDR1, a vhCDR2, and a vhCDR3, respectively, of a VH depicted in FIG. 15 or 16 or a variant thereof; and (ii) a VL comprising a vlCDR1, a vlCDR2, and a vlCDR3 having an amino acid sequence of a vlCDR1, a vlCDR2, and a vlCDR3, respectively, of a VL depicted in FIGS. 15, 17 or 82 or a variant thereof.

[0299] In some embodiments, the anti-CD28 x anti-STEAP1 antibody includes a CD28 binding domain that includes a VH and VL selected from the following:(i) a VH having an amino acid sequence of a VH of any of the CD28 binding domains depicted in FIGS. 15, 18, 21 and 65 or a variant thereof; and (ii) a VL having an amino acid sequence of the VL of the CD28 binding domain depicted in FIGS. 15, 18, 21 and 65 or a variant thereof; or(i) a VH having an amino acid sequence of a VH depicted in FIG. 15 or 16 or a variant thereof; and (ii) a VL having an amino acid sequence of the VL of a VL depicted in FIGS. 15, 17 or 82 or a variant thereof.

### B. STEAP1 Binding Domains

[0300] In one aspect, provided herein are STEAP1 antigen binding domain (ABD) compositions. In embodiments, the STEAP1 ABDs include a set of 6 CDRs as depicted in the sequence listing and FIG. 22 or FIGS. 31 and 32, either as the CDRs are underlined or, in the case where a different numbering scheme is used as described herein and as shown in Table 2, as the CDRs that are identified using other alignments within the variable heavy (VH) domain of those depicted in FIGS. 22, 31, or 39 and variable light domain (VL) sequences of those depicted in FIGS. 22, 32, or 39 and the sequence listing (see Table 2).

[0301] Suitable STEAP1 ABDs can also include the entire VH and VL sequences as depicted in these sequences and figures, used as scFvs or as Fab domains. In embodiments, the STEAP1 ABD includes a variable heavy (VH) domain or variant thereof and/or variable light (VL) domain or variant thereof of any of the STEAP1 binding domains disclosed herein (e.g., FIGS. 22 and 39). Such STEAP1 binding domains are useful, for example, for inclusion in the anti-CD28 x anti-STEAP1 antibodies provided herein.

[0302] In exemplary embodiments, the STEAP1 ABD includes the variable heavy (VH) domain and variable light (VL) domain of any one of the STEAP1 ABDs described herein, including the figures and sequence listing. In exemplary embodiments, the STEAP1 ABD is a STEAP1 ABD depicted in FIG. 22 or 39. In exemplary embodiments, the STEAP1 ABD comprises a VH and VL pair selected from those depicted in FIGS. 22 and 39.

[0303] In exemplary embodiments, the STEAP1 ABD comprises a VH selected from those depicted in FIG. 31 and a VL selected from those depicted in FIG. 32.

[0304] In addition to the parental STEAP1 variable heavy and variable light domains disclosed herein, provided herein are STEAP1 ABDs that include a variable heavy domain and/or a variable light domain that are variants of a STEAP1 ABD VH and VL domain disclosed herein. In one embodiment, the variant VH domain and/or VL domain has from 1, 2, 3, 4, 5, 6, 7, 8, 9 or 10 amino acid changes from a VH and/or VL domain of a STEAP1 ABD described herein, including the figures and sequence listing. In exemplary embodiments, the variant VH domain and/or VL domain has from 1, 2, 3, 4, 5, 6, 7, 8, 9 or 10 amino acid changes from a VH and/or VL domain of a STEAP1 ABD depicted in FIG. 22 or 39. In some embodiments, the changes are in a VH domain depicted in FIG. 22 or FIG. 31. In some embodiments, the changes are in a VL domain depicted in FIG. 22 or FIG. 32. In some embodiments, the changes are in a VH and VL domain depicted in FIG. 22. In some embodiments, the changes are in a VH depicted in FIG. 31 and a VL depicted in FIG. 32. In some embodiments, the one or more amino acid changes are in the VH and/or VL framework regions (FR1, FR2, FR3, and/or FR4). In some embodiments, the one or more amino acid change(s) are in one or more of vhCDR1-3 and/or vlCDR1-3. In some embodiments, the STEAP1 variant includes the vhCDR1-3 and/or vlCDR1-3 of any of the STEAP1 ABDs in FIGS. 22 and 39. In some embodiments, the STEAP1 variant includes the vhCDR1-3 of any of the VH domains in FIG. 31 and the vlCDR1-3 of any of the VL domains in FIG. 32. In certain embodiments, the STEAP1 ABD is capable of binding to STEAP1 , as measured at least one of a Biacore, surface plasmon resonance (SPR), flow cytometry, and/or BLI (biolayer interferometry, e.g., Octet assay) assay, with the latter finding particular use in many embodiments. In particular embodiments, the STEAP1 ABD is capable of binding human STEAP1 antigen (FIG. 2).

[0305] In one embodiment, the variant VH and/or VL domain is at least 90, 95, 97, 98 or 99% identical to the VH and/or VL of a STEAP1 ABD as described herein, including the figures and sequence listing. In exemplary embodiments, the variant VH and/or VL domain is at least 90, 95, 97, 98 or 99% identical to the VH and/or VL of a STEAP1 ABD depicted in FIG. 22. In some embodiments, the STEAP1 ABD includes a VH that is at least 90, 95, 97, 98 or 99% identical to a VH domain depicted in FIG. 22 or FIG. 31. In some embodiments, the STEAP1 ABD includes a VL that is at least 90, 95, 97, 98 or 99% identical to a VL domain depicted in FIG. 22 or FIG. 32. In some embodiments, the STEAP1 ABD includes a VH and a VL that is at least 90, 95, 97, 98 or 99% identical to a VH domain and a VL domain depicted in FIG. 22. In some embodiments, the STEAP1 ABD includes a VH and a VL that is at least 90, 95, 97, 98 or 99% identical to a VH domain depicted in FIG. 31 and a VL domain depicted in FIG. 32. In some embodiments, the STEAP1 ABD includes the 6 CDRs (vhCDR1-3 and vlCDR1-3) of any of the STEAP1 ABDs of FIG. 22. In some embodiments, the STEAP1 ABD includes the vhCDRT-3 of any of the VH domains depicted in FIG. 31 and the vlCDR1-3 of any of the VL domains depicted in FIG. 32. In certain embodiments, the STEAP1 is capable of binding to the STEAP1 , as measured by at least one of a Biacore, surface plasmon resonance (SPR), flow cytometry, and/or BLI (biolayer interferometry, e.g., Octet assay) assay, with the latter finding particular use in many embodiments. In particular embodiments, the STEAP1 ABD is capable of binding human STEAP1 antigen (FIG. 2).

[0306] The anti-CD28 x anti-STEAP1 antibodies provided herein include at least one STEAP1 binding domain. Subject antibodies that include such STEAP1 antigen binding domains (e.g., anti-STEAP1 x anti-CD3 bispecific antibodies) advantageously target cells that express high levels of STEAP1 over those that express levels of STEAP1 (e.g., normal cells).

[0307] In some embodiments, the STEAP1 ABD of the anti-CD28 x anti-STEAP1 antibody includes a set of 6 CDRs as depicted in the sequence listing and FIG. 22 or FIG. 31 and FIG. 32, either as the CDRs are underlined or, in the case where a different numbering scheme is used as described herein and as shown in Table 2, as the CDRs that are identified using other alignments within the variable heavy (VH) domain sequence of those depicted in FIG. 22 and FIG. 31, the variable light domain (VL) sequences of those depicted in FIG. 22 and FIG. 32, and the sequence listing (see Table 2).

[0308] In exemplary embodiments, the STEAP1 ABD of the anti-CD28 x anti-STEAP1 antibody includes the variable heavy (VH) domain and variable light (VL) domain of any one of the STEAP1 ABDs described herein, including the figures and sequence listing.

[0309] In exemplary embodiments, the STEAP1 ABD of the anti-CD28 x anti-STEAP1 antibody is a STEAP1 ABD depicted in FIG. 22 or 39. In exemplary embodiments, the STEAP1 ABD of the anti-CD28 x anti-STEAP1 antibody includes any one of the variable heavy (VH) domains depicted in FIG. 31 and any one of the variable light (VL) domains depicted in FIG. 32.

[0310] In addition to the parental STEAP1 variable heavy and variable light domains disclosed herein, provided herein are STEAP1 ABDs that include a variable heavy domain and/or a variable light domain that are variants of a STEAP1 ABD VH and VL domain disclosed herein. In one embodiment, the variant VH domain and/or VL domain has from 1, 2, 3, 4, 5, 6, 7, 8, 9 or 10 amino acid changes from a VH and/or VL domain of a STEAP1 ABD described herein, including the figures and sequence listing. In exemplary embodiments, the variant VH domain and/or VL domain has from 1, 2, 3, 4, 5, 6, 7, 8, 9 or 10 amino acid changes from a VH and/or VL domain of a STEAP1 ABD depicted in FIG. 22 or 39. In exemplary embodiments, the variant VH domain and/or VL domain has from 1, 2, 3, 4, 5, 6, 7, 8, 9 or 10 amino acid changes from a VH domain depicted in FIG. 31 and/or a VL domain depicted in FIG. 32. In some embodiments, the changes are in a VH domain depicted in FIG. 22 or FIG. 31. In some embodiments, the changes are in a VL domain depicted in FIG. 22 or FIG. 32. In some embodiments, the changes are in a VH and VL domain depicted in FIG. 22. In some embodiments, the changes are in a VH domain depicted in FIG. 31 and a VL domain depicted in FIG. 32. In some embodiments, the one or more amino acid changes are in the VH and/or VL framework regions (FR1, FR2, FR3, and/or FR4). In some embodiments, the one or more amino acid change(s) are in one or more of vhCDR1-3 and/or vlCDR1-3. In some embodiments, the STEAP1 variant includes the vhCDR1-3 and/or vlCDR1-3 of any of the STEAP1 ABDs in FIG. 22 or 39. In some embodiments, the STEAP1 variant includes the vhCDR1-3 of any of the VH domains depicted in FIG. 31 and the vlCDR1-3 of any of the VL domains depicted in FIG. 32. In certain embodiments, the STEAP1 ABD of the anti-CD28 x anti-STEAP1 antibody is capable of binding to STEAP1 , as measured at least one of a Biacore, surface plasmon resonance (SPR), flow cytometry, and/or BLI (biolayer interferometry, e.g., Octet assay) assay, with the latter finding particular use in many embodiments. In particular embodiments, the STEAP1 ABD is capable of binding human STEAP1 antigen (FIG. 2).

[0311] In one embodiment, the variant VH and/or VL domain is at least 90, 95, 97, 98 or 99% identical to the VH and/or VL of a STEAP1 ABD as described herein, including the figures and sequence listing. In exemplary embodiments, the variant VH and/or VL domain is at least 90, 95, 97, 98 or 99% identical to the VH and/or VL of a STEAP1 ABD depicted in FIG. 22 or 39. In exemplary embodiments, the variant VH domain and/or VL domain is at least 90, 95, 97, 98 or 99% identical to the VH domain depicted in FIG. 31 and/or the VL domain depicted in FIG. 32. In some embodiments, the STEAP1 ABD includes a VH that is at least 90, 95, 97, 98 or 99% identical to VH domain depicted in FIG. 22 or FIG. 31. In some embodiments, the STEAP1 ABD includes a VL that is at least 90, 95, 97, 98 or 99% identical to VL domain depicted in FIG. 22 or FIG. 32. In some embodiments, the STEAP1 ABD includes a VH and a VL that is at least 90, 95, 97, 98 or 99% identical to a VH domain and a VL domain depicted in FIG. 22 or 39. In some embodiments, the STEAP1 ABD includes a VH and a VL that is at least 90, 95, 97, 98 or 99% identical to a VH domain depicted in FIG. 31 and a VL domain depicted in FIG. 32. In some embodiments, the STEAP1 ABD includes the 6 CDRs (vhCDR1-3 and vlCDR1-3) of any of the STEAP1 ABDs of FIG. 22. In some embodiments, the STEAP1 ABD includes the vhCDR1-3 of any of the VH domains depicted in FIG. 31 and the vlCDR1-3 of any of the VL domains depicted in FIG. 32. In certain embodiments, the STEAP1 ABD of the anti-CD28 x anti-STEAP1 antibody is capable of binding to the STEAP1 , as measured by at least one of a Biacore, surface plasmon resonance (SPR), flow cytometry, and/or BLI (biolayer interferometry, e.g., Octet assay) assay, with the latter finding particular use in many embodiments. In particular embodiments, the STEAP1 ABD is capable of binding human STEAP1 antigen (FIG. 2).

[0312] In some embodiments, the anti-CD28 x anti-STEAP1 antibody is a bivalent antibody (e.g., 1+1 Fab-scFv-Fc format antibody) that includes one STEAP1 binding domain.

[0313] In other embodiments, the anti-CD28 x anti-STEAP1 antibody is a trivalent antibody (e.g., 2+1 mAb-scFv, 2+1 Fab2.scFv-Fc, and 2+1 Fab2-Fc x scFv-Fc format antibodies) that includes two STEAP1 binding domains.

### C. Chimeric and Humanized Antibodies

[0314] In certain embodiments, the subject antibodies provided herein include a heavy chain variable region from a particular germline heavy chain immunoglobulin gene and/or a light chain variable region from a particular germline light chain immunoglobulin gene. For example, such antibodies may comprise or consist of a human antibody comprising heavy or light chain variable regions that are “the product of” or “derived from” a particular germline sequence. A human antibody that is “the product of” or “derived from” a human germline immunoglobulin sequence can be identified as such by comparing the amino acid sequence of the human antibody to the amino acid sequences of human germline immunoglobulins and selecting the human germline immunoglobulin sequence that is closest in sequence (i.e., greatest % identity) to the sequence of the human antibody (using the methods outlined herein). A human antibody that is “the product of” or “derived from” a particular human germline immunoglobulin sequence may contain amino acid differences as compared to the germline sequence, due to, for example, naturally-occurring somatic mutations or intentional introduction of site-directed mutation. However, a humanized antibody typically is at least 90% identical in amino acids sequence to an amino acid sequence encoded by a human germline immunoglobulin gene and contains amino acid residues that identify the antibody as being derived from human sequences when compared to the germline immunoglobulin amino acid sequences of other species (e.g., murine germline sequences). In certain cases, a humanized antibody may be at least 95, 96, 97, 98 or 99%, or even at least 96%, 97%, 98%, or 99% identical in amino acid sequence to the amino acid sequence encoded by the germline immunoglobulin gene. Typically, a humanized antibody derived from a particular human germline sequence will display no more than 10⁻²⁰ amino acid differences from the amino acid sequence encoded by the human germline immunoglobulin gene (prior to the introduction of any skew, pI and ablation variants herein; that is, the number of variants is generally low, prior to the introduction of the variants of the invention). In certain cases, the humanized antibody may display no more than 5, or even no more than 4, 3, 2, or 1 amino acid difference from the amino acid sequence encoded by the germline immunoglobulin gene (again, prior to the introduction of any skew, pI and ablation variants herein; that is, the number of variants is generally low, prior to the introduction of the variants of the invention).

[0315] In one embodiment, the parent antibody has been affinity matured, as is known in the art. Structure-based methods may be employed for humanization and affinity maturation, for example as described in U.S. Ser. No. 11/004,590. Selection based methods may be employed to humanize and/or affinity mature antibody variable regions, including but not limited to methods described in Wu et al., 1999, J. Mol. Biol. 294:151-162; Baca et al., 1997, J. Biol. Chem. 272(16):10678-10684; Rosok et al., 1996, J. Biol. Chem. 271(37): 22611-22618; Rader et al., 1998, Proc. Natl. Acad. Sci. USA 95: 8910-8915; Krauss et al., 2003, Protein Engineering 16(10):753-759, all entirely incorporated by reference. Other humanization methods may involve the grafting of only parts of the CDRs, including but not limited to methods described in U.S. Ser. No. 09/810,510; Tan et al., 2002, J. Immunol. 169:1119-1125; De Pascalis et al., 2002, J. Immunol. 169:3076-3084, all entirely incorporated by reference.

### D. Heterodimeric Antibodies

[0316] In exemplary embodiments, the anti-CD28 x anti-STEAP1 antibodies provided herein are heterodimeric bispecific antibodies that include two variant Fc domain sequences. Such variant Fc domains include amino acid modifications to facilitate the self-assembly and/or purification of the heterodimeric antibodies.

[0317] An ongoing problem in antibody technologies is the desire for “bispecific” antibodies that bind to two different antigens simultaneously, in general thus allowing the different antigens to be brought into proximity and resulting in new functionalities and new therapies. In general, these antibodies are made by including genes for each heavy and light chain into the host cells. This generally results in the formation of the desired heterodimer (A-B), as well as the two homodimers (A-A and B-B (not including the light chain heterodimeric issues)). However, a major obstacle in the formation of bispecific antibodies is the difficulty in biasing the formation of the desired heterodimeric antibody over the formation of the homodimers and/or purifying the heterodimeric antibody away from the homodimers.

[0318] There are a number of mechanisms that can be used to generate the subject heterodimeric antibodies. In addition, as will be appreciated by those in the art, these different mechanisms can be combined to ensure high heterodimerization. Amino acid modifications that facilitate the production and purification of heterodimers are collectively referred to generally as “heterodimerization variants.” As discussed below, heterodimerization variants include “skew” variants (e.g., the “knobs and holes” and the “charge pairs” variants described below) as well as “pI variants,” which allow purification of heterodimers from homodimers.

[0319] As is generally described in U.S. Pat. No. 9,605,084, hereby incorporated by reference in its entirety and specifically as below for the discussion of heterodimerization variants, useful mechanisms for heterodimerization include “knobs and holes” (“KIH”) as described in U.S. Pat. No. 9,605,084, “electrostatic steering” or “charge pairs” as described in U.S. Pat. No. 9,605,084, pI variants as described in U.S. Pat. No. 9,605,084, and general additional Fc variants as outlined in U.S. Pat. No. 9,605,084 and below.

[0320] Heterodimerization variants that are useful for the formation and purification of the subject heterodimeric antibody (e.g., bispecific antibodies) are further discussed in detailed below. 1. Skew Variants

[0321] In some embodiments, the heterodimeric antibody includes skew variants which are one or more amino acid modifications in a first Fc domain (A) and/or a second Fc domain (B) that favor the formation of Fc heterodimers (Fc dimers that include the first and the second Fc domain; (A-B) over Fc homodimers (Fc dimers that include two of the first Fc domain or two of the second Fc domain; A-A or B-B). Suitable skew variants are included in the FIG. 29 of US Publ. App. No. 2016/0355608, hereby incorporated by reference in its entirety and specifically for its disclosure of skew variants, as well as in FIGS. 3 and 8.

[0322] One particular type of skew variants is generally referred to in the art as “knobs and holes,” referring to amino acid engineering that creates steric influences to favor heterodimeric formation and disfavor homodimeric formation, as described in U.S. Ser. No. 61/596,846, Ridgway et al., Protein Engineering 9(7):617 (1996); Atwell et al., J. Mol. Biol. 1997 270:26; U.S. Pat. No. 8,216,805, all of which are hereby incorporated by reference in their entirety and specifically for the disclosure of “knobs and holes” mutations. This is sometime referred to herein as “steric variants.” The figures identify a number of “monomer A- monomer B” pairs that rely on “knobs and holes.” In addition, as described in Merchant et al., Nature Biotech. 16:677 (1998), these “knobs and holes” mutations can be combined with disulfide bonds to further favor formation of Fc heterodimers.

[0323] Another method that finds use in the generation of heterodimers is sometimes referred to as “electrostatic steering” as described in Gunasekaran et al., J. Biol. Chem. 285(25):19637 (2010), hereby incorporated by reference in its entirety. This is sometimes referred to herein as “charge pairs.” In this embodiment, electrostatics are used to skew the formation towards heterodimerization. As those in the art will appreciate, these may also have an effect on pI, and thus on purification, and thus could in some cases also be considered pI variants. However, as these were generated to force heterodimerization and were not used as purification tools, they are classified as “skew variants.” These include, but are not limited to, D221E/P228E/L368E paired with D221R/P228R/K409R (e.g., these are “monomer corresponding sets) and C220E/P228E/368E paired with C220R/E224R/P228R/K409R.

[0324] In some embodiments, the skew variants advantageously and simultaneously favor heterodimerization based on both the “knobs and holes” mechanism as well as the “electrostatic steering” mechanism. In some embodiments, the heterodimeric antibody includes one or more sets of such heterodimerization skew variants. These variants come in “pairs” of “sets.” That is, one set of the pair is incorporated into the first monomer and the other set of the pair is incorporated into the second monomer. It should be noted that these sets do not necessarily behave as “knobs in holes” variants, with a one-to-one correspondence between a residue on one monomer and a residue on the other. That is, these pairs of sets may instead form an interface between the two monomers that encourages heterodimer formation and discourages homodimer formation, allowing the percentage of heterodimers that spontaneously form under biological conditions to be over 90%, rather than the expected 50% (25% homodimer A/A:50% heterodimer A/B:25% homodimer B/B). Exemplary heterodimerization “skew” variants are depicted in FIGS. 3 and 8. Such “skew” variants include, but are not limited to: S364K/E357Q: L368D/K370S; L368D/K370S: S364K; L368E/K370S: S364K; T411T/E360E/Q362E: D401K; L368D/K370S: S364K/E357L; K370S: S364K/E357Q (EU numbering).

[0325] In exemplary embodiments, the heterodimeric antibody includes a S364K/E357Q: L368D/K370S; L368D/K370S: S364K; L368E/K370S: S364K; T411T/E360E/Q362E: D401K; L368D/K370S: S364K/E357L; K370S: S364K/E357Q; or a T366S/L368A/Y407V: T366W (optionally including a bridging disulfide, T366S/L368A/Y407V/Y349C: T366W/S354C) “skew” variant amino acid substitution set (EU numbering). In an exemplary embodiment, the heterodimeric antibody includes a “S364K/E357Q: L368D/K370S” amino acid substitution set. In terms of nomenclature, the pair “S364K/E357Q: L368D/K370S” means that one of the monomers includes an Fc domain that includes the amino acid substitutions S364K and E357Q and the other monomer includes an Fc domain that includes the amino acid substitutions L368D and K370S; as above, the “strandedness” of these pairs depends on the starting pI.

[0326] In some embodiments, the skew variants provided herein can be optionally and independently incorporated with any other modifications, including, but not limited to, other skew variants (see, e.g., in FIG. 37 of US Publ. App. No. 2012/0149876, herein incorporated by reference, particularly for its disclosure of skew variants), pI variants, isotpypic variants, FcRn variants, ablation variants, etc. into one or both of the first and second Fc domains of the heterodimeric antibody. Further, individual modifications can also independently and optionally be included or excluded from the subject the heterodimeric antibody.

[0327] In some embodiments, the skew variants outlined herein can be optionally and independently incorporated with any pI variant (or other variants such as Fc variants, FcRn variants, etc.) into one or both heavy chain monomers, and can be independently and optionally included or excluded from the subject heterodimeric antibodies. 2. Purification Variants

[0328] In some embodiments, the heterodimeric antibody includes purification variants that advantageously allow for the separation of heterodimeric proteins (e.g., anti-CD28 x anti-STEAP1 bispecific antibody) from homodimeric proteins.

[0329] There are several basic mechanisms that can lead to ease of purifying heterodimeric antibodies. For example, modifications to one or both of the antibody heavy chain monomers A and B such that each monomer has a different pI allows for the isoelectric purification of heterodimeric A-B antibody from monomeric A-A and B-B proteins.

[0330] Alternatively, some scaffold formats, such as the “1+1 Fab-scFv-Fc” format, and the “2+1 Fab2-scFv-Fc” format, allows separation on the basis of size. As described above, it is also possible to “skew” the formation of heterodimers over homodimers using skew variants.

[0331] Thus, a combination of heterodimerization skew variants and purification variants find particular use in the heterodimeric antibodies provided herein.

[0332] Additionally, as more fully outlined below, depending on the format of the heterodimeric antibody, purification variants either contained within the constant region and/or Fc domains of a monomer, and/or domain linkers can be used. In some embodiments, the heterodimeric antibody includes additional modifications for alternative functionalities that can also create pI changes, such as Fc, FcRn and KO variants.

[0333] In some embodiments, the subject heterodimeric antibodies provided herein include at least one monomer with one or more modifications that alter the pI of the monomer (i.e., a “pI variant”). In general, as will be appreciated by those in the art, there are two general categories of pI variants: those that increase the pI of the protein (basic changes) and those that decrease the pI of the protein (acidic changes). As described herein, all combinations of these variants can be done: one monomer may be wild type, or a variant that does not display a significantly different pI from wild-type, and the other can be either more basic or more acidic. Alternatively, each monomer is changed, one to more basic and one to more acidic.

[0334] Depending on the format of the heterodimer antibody, pI variants can be either contained within the constant and/or Fc domains of a monomer, or charged linkers, either domain linkers or scFv linkers, can be used. That is, antibody formats that utilize scFv(s) such as “1+1 Fab-scFv-Fc”, format can include charged scFv linkers (either positive or negative), that give a further pI boost for purification purposes. As will be appreciated by those in the art, some 1+1 Fab-scFv-Fc and 2+1 Fab2-scFv-Fc formats are useful with just charged scFv linkers and no additional pI adjustments, although the invention does provide pI variants that are on one or both of the monomers, and/or charged domain linkers as well. In addition, additional amino acid engineering for alternative functionalities may also confer pI changes, such as Fc, FcRn and KO variants.

[0335] In subject heterodimeric antibodies that utilizes pI as a separation mechanism to allow the purification of heterodimeric proteins, amino acid variants are introduced into one or both of the monomer polypeptides. That is, the pI of one of the monomers (referred to herein for simplicity as “monomer A”) can be engineered away from monomer B, or both monomer A and B change be changed, with the pI of monomer A increasing and the pI of monomer B decreasing. As is outlined more fully below, the pI changes of either or both monomers can be done by removing or adding a charged residue (e.g., a neutral amino acid is replaced by a positively or negatively charged amino acid residue, e.g., glycine to glutamic acid), changing a charged residue from positive or negative to the opposite charge (aspartic acid to lysine) or changing a charged residue to a neutral residue (e.g., loss of a charge; lysine to serine.). A number of these variants are shown in the FIGS. 3 and 4.

[0336] Thus, in some embodiments, the subject heterodimeric antibody includes amino acid modifications in the constant regions that alter the isoelectric point (pI) of at least one, if not both, of the monomers of a dimeric protein to form “pI antibodies”) by incorporating amino acid substitutions (“pI variants” or “pI substitutions”) into one or both of the monomers. As shown herein, the separation of the heterodimers from the two homodimers can be accomplished if the pIs of the two monomers differ by as little as 0.1 pH unit, with 0.2, 0.3, 0.4 and 0.5 or greater all finding use in the present invention.

[0337] As will be appreciated by those in the art, the number of pI variants to be included on each or both monomer(s) to get good separation will depend in part on the starting pI of the components, for example in the 1+1 Fab-scFv-Fc, 2+1 Fab2-scFv-Fc, 1+1 CLC and 2+1 CLC formats, the starting pI of the scFv (1+1 Fab-scFv-Fc, 2+1 Fab2-scFv-Fc) and Fab(s) of interest. That is, to determine which monomer to engineer or in which “direction” (e.g., more positive or more negative), the Fv sequences of the two target antigens are calculated and a decision is made from there. As is known in the art, different Fvs will have different starting pIs which are exploited in the present invention. In general, as outlined herein, the pIs are engineered to result in a total pI difference of each monomer of at least about 0.1 logs, with 0.2 to 0.5 being preferred as outlined herein.

[0338] In the case where pI variants are used to achieve heterodimerization, by using the constant region(s) of the heavy chain(s), a more modular approach to designing and purifying bispecific proteins, including antibodies, is provided. Thus, in some embodiments, heterodimerization variants (including skew and pI heterodimerization variants) are not included in the variable regions, such that each individual antibody must be engineered. In addition, in some embodiments, the possibility of immunogenicity resulting from the pI variants is significantly reduced by importing pI variants from different IgG isotypes such that pI is changed without introducing significant immunogenicity. Thus, an additional problem to be solved is the elucidation of low pI constant domains with high human sequence content, e.g., the minimization or avoidance of non-human residues at any particular position. Alternatively or in addition to isotypic substitutions, the possibility of immunogenicity resulting from the pI variants is significantly reduced by utilizing isosteric substitutions (e.g. Asn to Asp; and Gln to Glu).

[0339] As discussed below, a side benefit that can occur with this pI engineering is also the extension of serum half-life and increased FcRn binding. That is, as described in US Publ. App. No. US 2012/0028304 (incorporated by reference in its entirety), lowering the pI of antibody constant domains (including those found in antibodies and Fc fusions) can lead to longer serum retention in vivo. These pI variants for increased serum half-life also facilitate pI changes for purification.

[0340] In addition, it should be noted that the pI variants give an additional benefit for the analytics and quality control process of bispecific antibodies, as the ability to either eliminate, minimize and distinguish when homodimers are present is significant. Similarly, the ability to reliably test the reproducibility of the heterodimeric antibody production is important.

[0341] In general, embodiments of particular use rely on sets of variants that include skew variants, which encourage heterodimerization formation over homodimerization formation, coupled with pI variants, which increase the pI difference between the two monomers to facilitate purification of heterodimers away from homodimers.

[0342] Exemplary combinations of pI variants are shown in FIGS. 3 and 4, and FIG. 30 of US Publ. App. No. 2016/0355608, all of which are herein incorporated by reference in its entirety and specifically for the disclosure of pI variants. Preferred combinations of pI variants are shown in FIGS. 3 and 4. As outlined herein and shown in the figures, these changes are shown relative to IgG1, but all isotypes can be altered this way, as well as isotype hybrids. In the case where the heavy chain constant domain is from IgG2-4, R133E and R133Q can also be used.

[0343] In one embodiment, a preferred combination of pI variants has one monomer (the negative Fab side) comprising 208D/295E/384D/418E/421D variants (N208D/Q295E/N384D/Q418E/N421D when relative to human IgG1) and a second monomer (the positive scFv side) comprising a positively charged scFv linker, including (GKPGS)₄(SEQ ID NO: 24). However, as will be appreciated by those in the art, the first monomer includes a CH1 domain, including position 208. Accordingly, in constructs that do not include a CH1 domain (for example for antibodies that do not utilize a CH1 domain on one of the domains), a preferred negative pI variant Fc set includes 295E/384D/418E/421D variants (Q295E/N384D/Q418E/N421D when relative to human IgG1).

[0344] Accordingly, in some embodiments, one monomer has a set of substitutions from FIG. 8 and the other monomer has a charged linker (either in the form of a charged scFv linker because that monomer comprises an scFv or a charged domain linker, as the format dictates, which can be selected from those depicted in FIG. 6).

[0345] In some embodiments, modifications are made in the hinge of the Fc domain, including positions 216, 217, 218, 219, 220, 221, 222, 223, 224, 225, 226, 227, 228, 229, and 230 based on EU numbering. Thus, pI mutations and particularly substitutions can be made in one or more of positions 216-230, with 1, 2, 3, 4 or 5 mutations finding use. Again, all possible combinations are contemplated, alone or with other pI variants in other domains.

[0346] Specific substitutions that find use in lowering the pI of hinge domains include, but are not limited to, a deletion at position 221, a non-native valine or threonine at position 222, a deletion at position 223, a non-native glutamic acid at position 224, a deletion at position 225, a deletion at position 235 and a deletion or a non-native alanine at position 236. In some cases, only pI substitutions are done in the hinge domain, and in others, these substitution(s) are added to other pI variants in other domains in any combination.

[0347] In some embodiments, mutations can be made in the CH2 region, including positions 233, 234, 235, 236, 274, 296, 300, 309, 320, 322, 326, 327, 334 and 339, based on EU numbering. It should be noted that changes in 233-236 can be made to increase effector function (along with 327A) in the IgG2 backbone. Again, all possible combinations of these 14 positions can be made; e.g., an antibody provided herein may include a variant Fc domain with 1, 2, 3, 4, 5, 6, 7, 8, 9 or 10 CH2 pI substitutions.

[0348] Specific substitutions that find use in lowering the pI of CH2 domains include, but are not limited to, a non-native glutamine or glutamic acid at position 274, a non-native phenylalanine at position 296, a non-native phenylalanine at position 300, a non-native valine at position 309, a non-native glutamic acid at position 320, a non-native glutamic acid at position 322, a non-native glutamic acid at position 326, a non-native glycine at position 327, a non-native glutamic acid at position 334, a non-native threonine at position 339, and all possible combinations within CH2 and with other domains.

[0349] In this embodiment, the modifications can be independently and optionally selected from position 355, 359, 362, 384, 389,392, 397, 418, 419, 444 and 447 (EU numbering) of the CH3 region. Specific substitutions that find use in lowering the pI of CH3 domains include, but are not limited to, a non-native glutamine or glutamic acid at position 355, a non-native serine at position 384, a non-native asparagine or glutamic acid at position 392, a non-native methionine at position 397, a non-native glutamic acid at position 419, a non-native glutamic acid at position 359, a non-native glutamic acid at position 362, a non-native glutamic acid at position 389, a non-native glutamic acid at position 418, a non-native glutamic acid at position 444, and a deletion or non-native aspartic acid at position 447.

[0350] In some embodiments, the anti-CD28 x anti-STEAP1 antibody includes amino acid substitutions in one of its Fc domains that reduces binding to Protein A. Such purification variants produces heterodimers with asymmetric binding to Protein A, which can in turn be used for separation of heterodimeric from homodimeric populations by a pH gradient. Exemplary purification amino acid substitutions that reduce binding to Protein A include, but are not limited to H435R and Y436F (IgG1 CH3 domain, EU numbering). See, e.g., US2010331527, which is incorporated by reference in its entirety, and specifically for pertinent disclosures relating to Fc domain modifications to reduce Protein A binding.

### 3. Isotypic Variants

[0351] In addition, many embodiments of the subject heterodimeric antibodies rely on the “importation” of pI amino acids at particular positions from one IgG isotype into another, thus reducing or eliminating the possibility of unwanted immunogenicity being introduced into the variants. A number of these are shown in FIG. 21 of US Publ. 2014/0370013, hereby incorporated by reference. That is, IgG1 is a common isotype for therapeutic antibodies for a variety of reasons, including high effector function. However, the heavy constant region of IgG1 has a higher pI than that of IgG2 (8.10 versus 7.31). By introducing IgG2 residues at particular positions into the IgG1 backbone, the pI of the resulting monomer is lowered (or increased) and additionally exhibits longer serum half-life. For example, IgG1 has a glycine (pI 5.97) at position 137, and IgG2 has a glutamic acid (pI 3.22); importing the glutamic acid will affect the pI of the resulting protein. As is described below, a number of amino acid substitutions are generally required to significant affect the pI of the variant antibody. However, it should be noted as discussed below that even changes in IgG2 molecules allow for increased serum half-life.

[0352] In other embodiments, non-isotypic amino acid changes are made, either to reduce the overall charge state of the resulting protein (e.g., by changing a higher pI amino acid to a lower pI amino acid), or to allow accommodations in structure for stability, etc. as is further described below.

[0353] In addition, by pI engineering both the heavy and light constant domains, significant changes in each monomer of the heterodimer can be seen. As discussed herein, having the pIs of the two monomers differ by at least 0.5 can allow separation by ion exchange chromatography or isoelectric focusing, or other methods sensitive to isoelectric point.

### 4. Calculating pI

[0354] The pI of each monomer of the antibodies provided herein can depend on the pI of the variant heavy chain constant domain and the pI of the total monomer, including the variant heavy chain constant domain and the fusion partner. Thus, in some embodiments, the change in pI is calculated on the basis of the variant heavy chain constant domain, using the chart in the FIG. 19 of US Pub. 2014/0370013. As discussed herein, which monomer to engineer is generally decided by the inherent pI of the Fv and scaffold regions. Alternatively, the pI of each monomer can be compared. 5. pI Variants that also confer better FcRn in vivo binding

[0355] In the case where the pI variant decreases the pI of the monomer, the pI variant can have the added benefit of improving serum retention in vivo.

[0356] Although still under examination, Fc regions are believed to have longer half-lives in vivo, because binding to FcRn at pH 6 in an endosome sequesters the Fc (Ghetie and Ward, 1997 Immunol Today. 18(12): 592-598, entirely incorporated by reference). The endosomal compartment then recycles the Fc to the cell surface. Once the compartment opens to the extracellular space, the higher pH, ˜7.4, induces the release of Fc back into the blood.

[0357] In mice, Dall′ Acqua et al. showed that Fc mutants with increased FcRn binding at pH 6 and pH 7.4 actually had reduced serum concentrations and the same half-life as wild-type Fc (Dall′ Acqua et al. 2002, J. Immunol. 169:5171-5180, entirely incorporated by reference).

[0358] The increased affinity of Fc for FcRn at pH 7.4 is thought to forbid the release of the Fc back into the blood. Therefore, the Fc mutations that will increase Fc's half-life in vivo will ideally increase FcRn binding at the lower pH while still allowing release of Fc at higher pH. The amino acid histidine changes its charge state in the pH range of 6.0 to 7.4. Therefore, it is not surprising to find His residues at important positions in the Fc/FcRn complex.

[0359] Recently it has been suggested that antibodies with variable regions that have lower isoelectric points may also have longer serum half-lives (Igawa et al., 2010 PEDS. 23(5): 385-392, entirely incorporated by reference). However, the mechanism of this is still poorly understood. Moreover, variable regions differ from antibody to antibody. Constant region variants with reduced pI and extended half-life would provide a more modular approach to improving the pharmacokinetic properties of antibodies, as described herein.

### E. Additional Fc Variants for Additional Functionality

[0360] In addition to the heterodimerization variants discussed above, there are a number of useful Fc amino acid modification that can be made for a variety of reasons, including, but not limited to, altering binding to one or more FcγR receptors, altered binding to FcRn receptors, etc., as discussed below.

[0361] Accordingly, the antibodies provided herein (heterodimeric, as well as homodimeric) can include such amino acid modifications with or without the heterodimerization variants outlined herein (e.g., the pI variants and steric variants). Each set of variants can be independently and optionally included or excluded from any particular heterodimeric protein.

### 1. FcγR and FcRn Variants

[0362] Accordingly, there are a number of useful Fc substitutions that can be made to alter binding to one or more of the FcγR receptors. In certain embodiments, the subject antibody includes modifications that alter the binding to one or more FcγR receptors (i.e., “FcγR variants”). Substitutions that result in increased binding as well as decreased binding can be useful. For example, it is known that increased binding to FcγRIIIa generally results in increased ADCC (antibody dependent cell-mediated cytotoxicity; the cell-mediated reaction wherein nonspecific cytotoxic cells that express FcγRs recognize bound antibody on a target cell and subsequently cause lysis of the target cell). Similarly, decreased binding to FcγRIIb (an inhibitory receptor) can be beneficial as well in some circumstances. Amino acid substitutions that find use in the subject antibodies include those listed in U.S. Pat. Nos. 8,188,321 (particularly FIG. 41) and 8,084,582, and US Publ. App. Nos. 20060235208 and 20070148170, all of which are expressly incorporated herein by reference in their entirety and specifically for the variants disclosed therein that affect Fcγ receptor binding. Particular variants that find use include, but are not limited to, 236A, 239D, 239E, 332E, 332D, 239D/332E, 267D, 267E, 328F, 267E/328F, 236A/332E, 239D/332E/330Y, 239D, 332E/330L, 243A, 243L, 264A, 264V and 299T. Such modification may be included in one or both Fc domains of the subject antibody.

[0363] In some embodiments, the subject antibody includes one or more Fc modifications that increase serum half-life. Fc substitutions that find use in increased binding to the FcRn receptor and increased serum half-life, as specifically disclosed in U.S. Ser. No. 12/341,769, hereby incorporated by reference in its entirety, including, but not limited to, 434S, 434A, 428L, 308F, 2591, 428L/434S, 2591/308F, 4361/428L, 4361 or V/434S, 436V/428L, 259I/308F/428L, and M252Y/S254T/T256E. Such modification may be included in one or both Fc domains of the subject antibody.

### 2. Ablation Variants

[0364] In some embodiments, the heterodimeric antibody includes one or more modifications that reduce or remove the normal binding of the Fc domain to one or more or all of the Fcγ receptors (e.g., FcγR1, FcγRIIa, FcγRIIb, FcγRIIIa, etc.) to avoid additional mechanisms of action. Such modifications are referred to as “FcγR ablation variants” or “Fc knock out (FcKO or KO)” variants. In these embodiments, for some therapeutic applications, it is desirable to reduce or remove the normal binding of the Fc domain to one or more or all of the Fcγ receptors (e.g., FcγR1, FcγRIIa, FcγRIIb, FcγRIIIa, etc.) to avoid additional mechanisms of action. That is, for example, in many embodiments, particularly in the use of bispecific antibodies that bind CD28 monovalently, it is generally desirable to ablate FcγRIIIa binding to eliminate or significantly reduce ADCC activity. In some embodiments, of the subject antibodies described herein, at least one of the Fc domains comprises one or more Fcγ receptor ablation variants. In some embodiments, of the subject antibodies described herein, both of the Fc domains comprises one or more Fcγ receptor ablation variants. These ablation variants are depicted in FIG. 5, and each can be independently and optionally included or excluded, with preferred aspects utilizing ablation variants selected from the group consisting of. L234A/L235A/D265S, G236R/L328R, E233P/L234V/L235A/G236del/S239K, E233P/L234V/L235A/G236del/S267K, E233P/L234V/L235A/G236del/S239K/A327G, E233P/L234V/L235A/G236del/S267K/A327G and E233P/L234V/L235A/G236del. It should be noted that the ablation variants referenced herein ablate FcγR binding but generally not FcRn binding.

[0365] As is known in the art, the Fc domain of human IgG1 has the highest binding to the Fcγ receptors, and thus ablation variants can be used when the constant domain (or Fc domain) in the backbone of the heterodimeric antibody is IgG1. Alternatively, or in addition to ablation variants in an IgG1 background, mutations at the glycosylation position 297 (generally to A or S) can significantly ablate binding to FcγRIIIa, for example. Human IgG2 and IgG4 have naturally reduced binding to the Fcγ receptors, and thus those backbones can be used with or without the ablation variants.

### F. Combination of Heterodimeric and Fc Variants

[0366] As will be appreciated by those in the art, all of the recited heterodimerization variants (including skew and/or purification variants) can be optionally and independently combined in any way, as long as they retain their “strandedness” or “monomer partition.” In addition, all of these variants can be combined into any of the heterodimerization formats.

[0367] In the case of pI variants, while embodiments finding particular use are shown in the figures, other combinations can be generated, following the basic rule of altering the pI difference between two monomers to facilitate purification.

[0368] In addition, any of the heterodimerization variants (skew and purification variants), are also independently and optionally combined with Fc ablation variants, Fc variants, FcRn variants, as generally outlined herein.

[0369] Exemplary combination of variants that are included in some embodiments of the heterodimeric 1+1 Fab-scFv-Fc, 2+1 mAb-Fc, 2+1 Fab2-scFv-Fc, and 2+1 Fab2-Fc x scFv-Fc format antibodies are included in FIG. 8. In some embodiments, the heterodimeric antibody includes a combination of variants as depicted in FIG. 8.

### G. Useful Antibody Formats

[0370] As will be appreciated by those in the art and discussed more fully below, the heterodimeric bispecific antibodies provided herein can take on several different configurations as generally depicted in FIG. 14.

[0371] As will be appreciated by those in the art, the heterodimeric formats of the invention can have different valencies as well as be bispecific. That is, heterodimeric antibodies of the invention can be bivalent and bispecific, or trivalent and bispecific, wherein the first antigen is bound by two binding domains and the second antigen by a second binding domain. As is outlined herein, when CD28 is one of the target antigens, it is preferable that the CD28 is bound only monovalently.

[0372] The present invention utilizes CD28 binding domains in combination with STEAP1 binding domains. As will be appreciated by those in the art, any collection of anti-CD28 CDRs, anti-CD28 variable light and variable heavy domains, Fabs and scFvs as depicted in any of the Figures (see particularly FIGS. 15, 18, 21 and 65) or variants thereof can be used. Similarly, any of the STEAP1 antigen binding domains can be used, whether CDRs, variable light and variable heavy domains, Fabs and scFvs as depicted in any of the Figures (see e.g., FIGS. 22, 31, and 32) or variants thereof can be used, optionally and independently combined in any combination.

1. 1+1 Fab-scFv-Fc format

[0373] One heterodimeric antibody format that finds particular use in subject anti-CD28 x anti-STEAP1 antibodies provided herein is the “1+1 Fab-scFv-Fc” or “bottle opener” format as shown in FIG. 14A. The 1+1 Fab-scFv-Fc format antibody includes a first monomer that is a “regular” heavy chain (VH1-CH1-hinge-CH2-CH3), wherein VH1 is a first variable heavy domain and CH2-CH3 is a first Fc domain. The 1+1 Fab-scFv-Fc also includes a light chain that includes a first variable light domain VL1 and a constant light domain CL. The light chain interacts with the VH1-CH1 of the first monomer to form a first antigen binding domain that is a Fab. The second monomer of the antibody includes a second binding domain that is a single chain Fv (“scFv,” as defined below) and a second Fc domain.

[0374] The scFv includes a second variable heavy domain (VH2) and a second variable light domain (VL2), wherein the VH2 is attached to the VL2 using an scFv linker that can be charged (see, e.g., FIG. 6). The scFv is attached to the heavy chain using a domain linker (see, e.g., FIG. 7). The two monomers are brought together by the use of amino acid variants (e.g., heterodimerization variants, discussed above) in the constant regions (e.g., the Fc domain, the CH1 domain and/or the hinge region) that promote the formation of heterodimeric antibodies as is described more fully below. This structure is sometimes referred to herein as the “bottle-opener” format, due to a rough visual similarity to a bottle-opener. In some embodiments, the 1+1 Fab-scFv-Fc format antibody is a bivalent antibody.

[0375] There are several distinct advantages to the present “1+1 Fab-scFv-Fc” format. As is known in the art, antibody analogs relying on two scFv constructs often have stability and aggregation problems, which can be alleviated in the present invention by the addition of a “regular” heavy and light chain pairing. In addition, as opposed to formats that rely on two heavy chains and two light chains, there is no issue with the incorrect pairing of heavy and light chains (e.g., heavy 1 pairing with light 2, etc.).

[0376] In some embodiments of the 1+1 Fab-scFv-Fc format antibody, one of the first or second antigen binding domain is a CD28 binding domain and the other binding domain is a STEAP1 binding domain. In some embodiments where the 1+1 Fab-scFv-Fc, it is the scFv that binds to the CD28, and the Fab that binds STEAP1 . Exemplary anti-CD28 x anti-STEAP1 bispecific antibodies in the 1+1 Fab-scFv-Fc format are depicted in FIG. 24.

[0377] In some embodiments, the first and second Fc domains of the 1+1 Fab-scFv-Fc format antibody are variant Fc domains that include heterodimerization skew variants (e.g., a set of amino acid substitutions as shown in FIGS. 3 and 8). Particularly useful heterodimerization skew variants include S364K/E357Q: L368D/K370S; L368D/K370S: S364K; L368E/K370S: S364K; T411T/E360E/Q362E: D401K; L368D/K370S: S364K/E357L; K370S: S364K/E357Q; T366S/L368A/Y407V: T366W and T366S/L368A/Y407V/Y349C: T366W/S354C (EU numbering). In exemplary embodiments, one of the first or second variant Fc domains includes heterodimerization skew variants L368D/K370S and the other of the first or second variant Fc domains includes heterodimerization skew variants S364K/E357Q, wherein numbering is according to EU numbering. In exemplary embodiments, the first variant Fc domain includes heterodimerization skew variants L368D/K370S and the second variant Fc domain includes heterodimerization skew variants S364K/E357Q, wherein numbering is according to EU numbering.

[0378] In some embodiments, the variant Fc domains include ablation variants (including those shown in FIG. 5). In some embodiments, each of the first and second variant Fc domains include ablation variants E233P/L234V/L235A/G236del/S267K, wherein numbering is according to EU numbering.

[0379] In some embodiments, the constant domain (CH1-hinge-CH2-CH3) of the first monomer includes pI variants (including those shown in FIGS. 3 and 4). In exemplary embodiments, the constant domain (CH1-hinge-CH2-CH3) of the first monomer includes pI variants N208D/Q295E/N384D/Q418E/N421D, wherein numbering is according to EU numbering.

[0380] In exemplary embodiments, the 1+1 Fab-scFv-Fc format antibody includes a combination of amino acid modifications as depicted in FIG. 8. In such embodiments, the CH1-hinge-CH2-CH3 of the first monomer comprises amino acid variants L368D/K370S/N208D/Q295E/N384D/Q418E/N421D/E233P/L234V/L235A/G236del/S267 K, the second Fc domain comprises amino acid variants S364K/E357Q/E233P/L234V/L235A/G236del/S267K, wherein numbering is according to EU numbering.

[0381] In some embodiments, the scFv of the 1+1 Fab-scFv-Fc format antibody provided herein includes a charged scFv linker (including those shown in FIG. 6). In some embodiments, the 1+1 Fab-scFv-Fc format antibody provided herein includes FcRn variants M428L/N434S, wherein numbering is according to EU numbering.

[0382] In exemplary embodiments 1+1 Fab-scFv-Fc format antibody, the first Fc domain includes heterodimerization skew variants L368D/K370S and the second Fc domain includes heterodimerization skew variants S364K/E357Q; each of the first and second Fc domains include ablation variants E233P/L234V/L235A/G236del/S267K; and the constant domain (CH1-hinge-CH2-CH3) of the first monomer includes pI variants N208D/Q295E/N384D/Q418E/N421D, wherein numbering is according to EU numbering. In some embodiments, the scFv of the 1+1 Fab-scFv-Fc format antibody provided herein includes a (GKPGS)₄ charged scFv linker (SEQ ID NO: 24). In some embodiments, the 1+1 Fab-scFv-Fc format antibody provided herein includes FcRn variants M428L/N434S, wherein numbering is according to EU numbering. In some embodiments, the scFv of the 1+1 Fab-scFv-Fc format antibody provided herein includes a charged scFv linker (including those shown in FIG. 6).

[0383] Any suitable CD28 binding domain can be included in subject 1+1 Fab-scFv-Fc format antibody, including any of the CD28 binding domains provided herein. In some embodiments, the CD28 binding domain is one of the following CD28 binding domains or a variant thereof: 1A7[CD28]_H1L1, 1A7[CD28]_H1.1_L1, 1A7[CD28]_H1_L1.71, 1A7[CD28]_H1.1_L1.71, 1A7[CD28]H1.14_L1, IA7[CD28]_H1.14_L1.71, CD28.3[CD28]_H0L0, hCD28.3[CD28]_H1L1, 5.11A1[CD28]_H0L0, TGN1412_H1L1, 341VL34[CD28]H1L1, 341VL36[CD28]_H1L1, 281VL4[CD28]_H1L1, HuTN228[CD28]_H1L1, PV1[CD28]H0L0, m9.3[CD28]_H0L0, hu9.3[CD28]_H1L1, 9G2[CD28]_H0L0, 9G2[CD28]_H1L1, 2F10A3.140[CD28]_H1L1, TN228[CD28]_H4L2, IA7[CD28]_H1.1_L1 [S-S], IA7[CD28]_H1_L1.71 [S-S], IA7[CD28]_H1.1_L1.71 [S-S], IA7[CD28]_H1.14_L1 [S-S], IA7[CD28]_H1.14_L1.71 [S-S], IA7[CD28]_H1.129_L1.71 [S-S], 1A7[CD28]_H1.106_L1.71 [S-S], 1A7[CD28]_H1.129_L1 [S-S], and IA7[CD28]_H1.106_L1 [S-S](FIGS. 15, 18, 21 and 65). Additional VH and VL sequences of exemplary CD28 binding domains that can be used in the subject 1+1 Fab-scFv-Fc format antibody are depicted in FIGS. 15, 16, 17, and 82.

[0384] In some embodiments of the 1+1 Fab-scFv-Fc format, the anti-CD28 ABD has a VH and VL domain selected from the following:(i) a VH comprising a vhCDR1, a vhCDR2, and a vhCDR3 having an amino acid sequence of a vhCDR1, a vhCDR2, and a vhCDR3, respectively, of a VH of any of the CD28 binding domains depicted in FIGS. 15, 18, 21 and 65 or a variant thereof; and (ii) a VL comprising a vlCDR1, a vlCDR2, and a vlCDR3 having an amino acid sequence of a vlCDR1, a vlCDR2, and a vlCDR3, respectively, of a VL of the CD28 binding domains depicted in FIGS. 15, 18, 21 and 65 or a variant thereof; or(i) a VH comprising a vhCDR1, a vhCDR2, and a vhCDR3 having an amino acid sequence of a vhCDR1, a vhCDR2, and a vhCDR3, respectively, of a VH depicted in FIG. 15 or 16 or a variant thereof; and (ii) a VL comprising a vlCDR1, a vlCDR2, and a vlCDR3 having an amino acid sequence of a vlCDR1, a vlCDR2, and a vlCDR3, respectively, of a VL depicted in FIGS. 15, 17 or 82 or a variant thereof.

[0385] In some embodiments of the 1+1 Fab-scFv-Fc format, the anti-CD28 ABD has a VH and VL domain selected from the following: (i) a VH having an amino acid sequence of a VH of any of the CD28 binding domains depicted in FIGS. 15, 18, 21 and 65 or a variant thereof; and (ii) a VL having an amino acid sequence of a VL of the CD28 binding domain depicted in FIGS. 15, 18, 21 and 65 or a variant thereof; or (i) a VH having an amino acid sequence of a VH depicted in FIG. 15 or 16 or a variant thereof; and (ii) a VL having an amino acid sequence of the VL of a VL depicted in FIGS. 15, 17 or 82 or a variant thereof.

[0386] Any suitable STEAP1 binding domain can be included in subject 1+1 Fab-scFv-Fc format antibody, including any of the STEAP1 binding domains provided herein. In some embodiments, the STEAP1 binding domain is one of the following STEAP1 binding domains or a variant thereof. H1 and L1, H1.1 and L1, H1.2 and L1, H1.3 and L1, H1.4 and L1, H1.5 and L1, H1.6 and L1, H1.7 and L1, H1.8 and L1, H1.9 and L1, H1.10 and L1, H1.II and L1, H1.12 and L1, H1.13 and L1, H1.14 and L1, H1.15 and L1, H1.16 and L1, H1.17 and L1, H1.18 and L1, H1.19 and L1, H1.20 and L1, H1.21 and L1, H1.22 and L1, H1.23 and L1, H1.24 and L1, H1.25 and L1, H1.26 and L1, H1.27 and L1, H1.28 and L1, H1.29 and L1, H1.30 and L1, H1.31 and L1, H1.32 and L1, H1.33 and L1, H1.34 and L1, H1.35 and L1, H1.36 and L1, H1.37 and L1, H1.38 and L1, H1 and L1.1, H1 and L1.2, H1 and L1.3, H0 and L0, H1.21 and L1.3, H1.34 and L1.3, H1.39 and L1, H1.40 and L1, H1.4I and L1, H1.42 and L1, H1.43 and L1, H1.44 and L1, H1.45 and L1, H1.46 and L1, H1.47 and L1, H1.48 and L1, H1.49 and L1, H1.50 and L1, H1.51 and L1, H1.52 and L1, H1.53 and L1, H1.54 and L1, H1.55 and L1, H1.56 and L1, H1.57 and L1, H1.58 and L1, H1.59 and L1, H1.60 and L1, H1.61 and L1, H1.62 and L1, H1.63 and L1, H1.64 and L1, H1.65 and L1, H1.66 and L1, H1.67 and L1, H1.68 and L1, H1.69 and L1, H1.70 and L1, H1.71 and L1, H1.72 and L1, H1.73 and L1, H1.74 and L1, H1.75 and L1, H1.76 and L1, H1.77 and L1, H1.78 and L1, H1.79 and L1, H1.80 and L1, H1.81 and L1, H1.82 and L1, H1.83 and L1, H1.84 and L1, H1.85 and L1, H1.86 and L1, H1.87 and L1, H1.88, and L1, H1.89 and L1, H1.90 and L1, H1.91 and L1, H1.92 and L1, H1.93 and L1, H1.94 and L1, H1.95 and L1, H1.96 and L1, H1.97 and L1, H1.98 and L1, H1.99 and L1, H1.100 and L1, H1.101 and L1, H1.102 and L1, H1.103 and L1, H1.104 and L1, H1.105 and L1, H1.106 and L1, H1.107 and L1, H1.108 and L1, H1.109 and L1, H1.110 and L1, H1.III and L1, H1.112 and L1, H1.113 and L1, H1.114 and L1, H1.115 and L1, H1.116 and L1, H1.117 and L1, H1.118 and L1, H1.119 and L1, H1.120 and L1, H1.121 and L1, H1.122 and L1, H1.123 and L1, H1.124 and L1, H1.125 and L1, H1.126 and L1, H1.127 and L1, H1.128 and L1, H1.129 and L1, H1.130 and L1, H1.131 and L1, H1.132 and L1, H1.133 and L1, H1.134 and L1, H1.135 and L1, H1.136 and L1, H1.137 and L1, H1.138 and L1, H1.139 and L1, H1.140 and L1, H1.141 and L1, H1.142 and L1, H1.143 and L1, H1.144 and L1, H1.145 and L1, H1.146 and L1, H1.147 and L1, H1.148 and L1, H1.149 and L1, H1.150 and L1, H1.151 and L1, H1.152 and L1, H1.153 and L1, H1.154 and L1, H1.155 and L1, H1.156 and L1, H1.157 and L1, H1.158 and L1, H1.159 and L1, H1.160 and L1, H1.161 and L1, H1.162 and L1, H1.163 and L1, H1.164 and L1, H1.165 and L1, H1.166 and L1, H1.167 and L1, H1.168 and L1, H1.169 and L1, H1.170 and L1, H1.171 and L1, H1.172 and L1, H1.173 and L1, H1.174 and L1, H1.175 and L1, H1.176 and L1, H1.177 and L1, H1.178 and L1, H1.179 and L1, H1.180 and L1, H1.181 and L1, H1.182 and L1, H1.183 and L1, H1.184 and L1, H1.185 and L1, H1.186 and L1, H1.187 and L1, H1.188 and L1, H1.189 and L1, H1 and L1.4, H1 and L1.5, H1 and L1.6, H1 and L1.7, H1 and L1.8, H1 and L1.9, H1 and L1.10, H1 and L1.11, H1 and L1.12, H1 and L1.13, H1 and L1.14, H1 and L1.15, H1 and L1.16, H1 and L1.17, H1 and L1.18, H1 and L1.19, H1 and L1.20, H1 and L1.21, H1 and L1.22, H1 and L1.23, H1 and L1.24, H1 and L1.25, H1 and L1.26, H1 and L1.27, H1 and L1.28, H1 and L1.29, H1 and L1.30, H1 and L1.31, H1 and L1.32, H1 and L1.33, H1 and L1.34, H1 and L1.35, H1 and L1.36, H1 and L1.37, H1 and L1.38, H1 and L1.39, H1 and L1.40, H1 and L1.41, H1 and L1.42, H1 and L1.43, H1 and L1.44, H1 and L1.45, H1 and L1.46, H1 and L1.47, H1 and L1.48, H1 and L1.49, H1 and L1.50, H1 and L1.51, H1 and L1.52, H1 and L1.53, H1 and L1.54, H1 and L1.55, H1 and L1.56, H1 and L1.57, H1 and L1.58, H1 and L1.59, H1 and L1.60, H1 and L1.61, H1 and L1.62, H1 and L1.63, H1 and L1.64, H1 and L1.65, H1 and L1.66, H1 and L1.67, H1 and L1.68, H1 and L1.69, H1 and L1.70, H1 and L1.71, H1 and L1.72, H1 and L1.73, H1 and L1.74, H1 and L1.75, H1 and L1.76, H1 and L1.77, H1 and L1.78, H1 and L1.79, H1 and L1.80, H1 and L1.81, H1 and L1.82, H1 and L1.83, H1 and L1.84, H1 and L1.85, H1.42 and L1.47, H1.42 and L1.56, H1.190 and L1.3, H1.191 and L1.3, H1.192 and L1.3, H1.195 and L1.3, H1.196 and L1.3, H1.197 and L1.3, H1.198 and L1.3, H1.199 and L1.3, H1.200 and L1.3, H1.201 and L1.3, H1.202 and L1.3, H1.203 and L1.3, H1.204 and L1.3, H1.205 and L1.3, H1.206 and L1.3, H1.207 and L1.3, H1.208 and L1.3, H1.209 and L1.3, H1.210 and L1.3, H1.211 and L1.3, H1.212 and L1.3, H1.213 and L1.3, H1.214 and L1.3, H1.215 and L1.3, H1.216 and L1.3, H1.217 and L1.3, H1.218 and L1.3, H1.219 and L1.3, H1.220 and L1.3, H1.221 and L1.3, H1.222 and L1.3, H1.223 and L1.3, H1.224 and L1.3, H1.225 and L1.3, H1.226 and L1.3, H1.227 and L1.3, H1.228 and L1.3, H1.21 and L1.92, H1.21 and L1.93, H1.21 and L1.94, H1.21 and L1.95, H1.21 and L1.96, H1.21 and L1.97, H1.21 and L1.98, H1.21 and L1.99, H1.21 and L1.100, H1.21 and L1.101, H1.21 and L1.102, H1.21 and L1.103, H1.21 and L1.104, H1.21 and L1.105, H1.21 and L1.106, H1.21 and L1.107, H1.21 and L1.108, H1.21 and L1.109, H1.21 and L1.110, H1.21 and L1.111, H1.21 and L1.112, H1.21 and L1.113, H1.21 and L1.114, H1.21 and L1.115, H1.21 and L1.116, H1.21 and L1.117, H1.21 and L1.118, H1.21 and L1.119, H1.195 and L1.92, H1.195 and L1.94, H1.195 and L1.95, H1.195 and L1.104, H1.195 and L1.105, H1.195 and L1.109, H1.196 and L1.92, H1.196 and L1.94, H1.196 and L1.95, H1.196 and L1.104, H1.196 and L1.105, H1.196 and L1.109, H1.205 and L1.92, H1.205 and L1.94, H1.205 and L1.95, H1.205 and L1.104, H1.205 and L1.105, H1.205 and L1.109, H1.193 and L1.91, H1.194 and L1.86, H1.194 and L1.87, H1.194 and L1.88, H1.194 and L1.89, or H1.194 and L1.90, or H1.2320 and L1.100, or H1.230 and L1.115 (FIGS. 22, 31, 32 and 39). Additional VH and VL sequences of exemplary STEAP1 binding domains that can be used in the subject 1+1 Fab-scFv-Fc format antibody are depicted in FIGS. 22, 31, and 32.

[0387] In some embodiments of the 1+1 Fab-scFv-Fc format, the STEAP1 ABD has a VH and VL domain selected from the following: (i) a VH comprising a vhCDR1, a vhCDR2, and a vhCDR3 having an amino acid sequence of a vhCDR1, a vhCDR2, and a vhCDR3, respectively, of a VH of any of the STEAP1 binding domains depicted in FIG. 22, or a variant thereof; and (ii) a VL comprising a vlCDR1, a vlCDR2, and a vlCDR3 having an amino acid sequence of a vlCDR1, a vlCDR2, and a vlCDR3, respectively, of a VL of any of the STEAP1 binding domains depicted in FIG. 22, or a variant thereof; or (i) a VH comprising a vhCDR1, a vhCDR2, and a vhCDR3 having an amino acid sequence of a vhCDR1, a vhCDR2, and a vhCDR3, respectively, of a VH depicted in FIG. 22 or FIG. 31 or a variant thereof; and (ii) a VL comprising a vlCDR1, a vlCDR2, and a vlCDR3 having an amino acid sequence of a vlCDR1, a vlCDR2, and a vlCDR3, respectively, of a VL depicted in FIG. 22 or FIG. 32 or a variant thereof.

[0388] In some embodiments of the 1+1 Fab-scFv-Fc format, the STEAP1 ABD has a VH and VL domain selected from the following: (i) a VH having an amino acid sequence of any of the VH of any of the STEAP1 binding domains depicted in FIG. 22 or a variant thereof; and (ii) a VL having an amino acid sequence of a VL of any of the STEAP1 binding domains depicted in FIG. 22; or (i) a VH having an amino acid sequence of a VH depicted in FIG. 22 or FIG. 31 or a variant thereof; and (ii) a VL having an amino acid sequence of a VL depicted in FIG. 22 or FIG. 32 or a variant thereof.

[0389] FIG. 9 shows some exemplary Fc domain sequences that are useful in the 1 +1 Fab-scFv-Fc format antibodies. The “monomer 1” sequences depicted in FIG. 9 typically refer to the Fc domain of the “Fab-Fc heavy chain” and the “monomer 2” sequences refer to the Fc domain of the “scFv-Fc heavy chain.” In addition, FIGS. 11 and 12 provide exemplary CH1-hinge domains, CH1 domains, and hinge domains that can be included in the first or second monomer of the 1+1 Fab-scFv-Fc format. Further, FIG. 13 provides useful CL sequences that can be used with this format. 2. 2+1 mAb-scFv Format

[0390] One heterodimeric antibody format that finds particular use in the subject bispecific anti-CD28 x anti-STEAP1 antibodies is the 2+1 mAb-scFv format shown in FIG. 14E. This antibody format includes three antigen binding domains: two Fab portions and an scFv that is attached to the C-terminal of one of the heavy chains. In some embodiments of this format, the Fab portions each bind STEAP1 , in this case, human STEAP1 and the “extra” scFv domain binds CD28. That is, this mAb-scFv format is a trivalent antibody.

[0391] In these embodiments, the first chain or monomer comprises, from N- to C-terminal, VH1-CH1-hinge-CH2-CH3, the second monomer comprises, from N- to C-terminal, VH1-CH1-hinge-CH2-CH3-domain linker-scFv domain, where the scFv domain comprises a second VH (VH2), a second VL (VL2) and a scFv linker. As for all the scFv domains herein, the scFv domain can be in either orientation, from N- to C-terminal, VH2-scFv linker-VL2 or VL2-scFv linker-VH2. Accordingly, the second monomer may comprise, from N- to C-terminal, VH1-CH1-hinge-CH2-CH3-domain linker-VH2-scFv linker-VL2 or VH1-CH1-hinge-CH2-CH3-domain linker-VL2-scFv linker-VH2. The composition also comprises a light chain, VL1-CL. In embodiments, this format includes two identical light chains (VL1-CL). In this format, the VHls are each a first variable heavy (VH) domain, the VL1s are each a first variable light (VL) domain, the VH2 is a second variable heavy domain, and the VL2 is a second variable light domain. In some embodiments, the format includes two identical common light chains (each VL1-CL), wherein each of the common light chains associates with one of the VH1-CH1 of the first and second monomers to form two identical Fabs (i.e., first antigen binding domains). In some embodiments, the scFv is the second antigen binding domain. In some embodiments, the first ABDs bind to human STEAP1 , and the second ABD binds human CD28.

[0392] In some embodiments, the first and second Fc domains of the 2+1 mAb-scFv format antibody are variant Fc domains that include heterodimerization skew variants (e.g., a set of amino acid substitutions as shown in FIGS. 3 and 8). Particularly useful heterodimerization skew variants include S364K/E357Q: L368D/K370S; L368D/K370S: S364K; L368E/K370S: S364K; T411T/E360E/Q362E: D401K; L368D/K370S: S364K/E357L; K370S: S364K/E357Q; T366S/L368A/Y407V: T366W and T366S/L368A/Y407V/Y349C: T366W/S354C (EU numbering). In exemplary embodiments, one of the first or second variant Fc domains includes heterodimerization skew variants L368D/K370S and the other of the first or second variant Fc domains includes heterodimerization skew variants S364K/E357Q, wherein numbering is according to EU numbering. In exemplary embodiments, the first variant Fc domain includes heterodimerization skew variants L368D/K370S and the second variant Fc domain includes heterodimerization skew variants S364K/E357Q, wherein numbering is according to EU numbering.

[0393] In some embodiments, the variant Fe domains include ablation variants (including those shown in FIG. 5). In some embodiments, each of the first and second variant Fc domains include ablation variants E233P/L234V/L235A/G236del/S267K, wherein numbering is according to EU numbering.

[0394] In some embodiments, the constant domain (CH1-hinge-CH2-CH3) of the first monomer includes pI variants (including those shown in FIGS. 3 and 4). In exemplary embodiments, the constant domain (CH1-hinge-CH2-CH3) of the first monomer includes pI variants N208D/Q295E/N384D/Q418E/N421D, wherein numbering is according to EU numbering.

[0395] In some embodiments, the scFv of the 2+1 mAb-scFv format antibody provided herein includes a charged scFv linker (including those shown in FIG. 6). In some embodiments, the 2+1 mAb-scFv format antibody provided herein includes FcRn variants M428L/N434S, wherein numbering is according to EU numbering.

[0396] In exemplary embodiments the 2+1 mAb-scFv format antibody includes a combination of amino acid modifications as depicted in FIG. 8. In such embodiments, the first variant Fc domain includes heterodimerization skew variants L368D/K370S and the second variant Fc domain includes heterodimerization skew variants S364K/E357Q; each of the first and second variant Fc domains include ablation variants E233P/L234V/L235A/G236del/S267K; and the constant domain (CH1-hinge-CH2-CH3) of the first monomer includes pI variants N208D/Q295E/N384D/Q418E/N421D, wherein numbering is according to EU numbering. In some embodiments, the scFv of the 2+1 mAb-scFv format antibody provided herein includes a (GKPGS)₄ charged scFv linker (SEQ ID NO: 24). In some embodiments, 2+1 mAb-scFv format antibody provided herein includes FcRn variants M428L/N434S, wherein numbering is according to EU numbering.

[0397] In some embodiments, the scFv of the second monomer of the 2+1 Fab2-scFv-Fc format antibody is a CD28 binding and the VH1 of the first and second monomer and the VL1 of the common light chain each form binding domains that bind STEAP1 . Any suitable STEAP1 binding domain and CD28 binding domain can be included in the 2+1 mAb-scFv format antibody, including any of the STEAP1 binding domains and CD28 binding domains and related VHs and VLs provided herein or a variant thereof (see, e.g., FIGS. 15, 18, and 21).

[0398] Any suitable CD28 binding domain can be included in subject 2+1 mAb-scFv format antibody, including any of the CD28 binding domains provided herein. In some embodiments, the CD28 binding domain is one of the following CD28 binding domains or a variant thereof: IA7[CD28]_H1L1, IA7[CD28]_H1.1_L1, IA7[CD28]_H1_L1.71, IA7[CD28]_H1.1_L1.71, IA7[CD28]H1.14_L1, IA7[CD28]_H1.14_L1.71, CD28.3[CD28]_H0L0, hCD28.3[CD28]_H1L1, 5.11A1[CD28]_H0L0, TGN1412_H1L1, 341VL34[CD28]H1L1, 341VL36[CD28]_H1L1, 281VL4[CD28]_H1L1, HuTN228[CD28]_H1L1, PV1[CD28]H0L0, m9.3[CD28]_H0L0, hu9.3[CD28]_H1L1, 9G2[CD28]_H0L0, 9G2[CD28]_H1L1, 2F10A3.140[CD28]_H1L1, TN228[CD28]_H4L2, IA7[CD28]_H1.1_L1 [S-S], IA7[CD28]_H1_L1.71 [S-S], IA7[CD28]_H1.1_L1.71 [S-S], IA7[CD28]_H1.14_L1 [S-S], IA7[CD28]_H1.14_L1.71 [S-S], IA7[CD28]_H1.129_L1.71 [S-S], 1A7[CD28]_H1.106_L1.71 [S-S], 1A7[CD28]_H1.129_L1 [S-S], and IA7[CD28]_H1.106_L1 [S-S](FIGS. 15, 18, 21 and 65). Additional VH and VL sequences of exemplary CD28 binding domains that can be used in the subject 2+1 mAb-scFv format antibody are depicted in FIGS. 15, 16, 17, and 82.

[0399] In some embodiments of the 2+1 mAb-scFv format, the anti-CD28 ABD has a VH and VL domain selected from the following:(i) a VH comprising a vhCDR1, a vhCDR2, and a vhCDR3 having an amino acid sequence of a vhCDR1, a vhCDR2, and a vhCDR3, respectively, of a VH of any of the CD28 binding domains depicted in FIGS. 15, 18, 21 and 65 or a variant thereof; and (ii) a VL comprising a vlCDR1, a vlCDR2, and a vlCDR3 having an amino acid sequence of a vlCDR1, a vlCDR2, and a vlCDR3, respectively, of the VL of the CD28 binding domain depicted in FIGS. 15, 18, 21 and 65 or a variant thereof; or(i) a VH comprising a vhCDR1, a vhCDR2, and a vhCDR3 having an amino acid sequence of a vhCDR1, a vhCDR2, and a vhCDR3, respectively, of a VH depicted in FIG. 15 or 16 or a variant thereof; and (ii) a VL comprising a vlCDR1, a vlCDR2, and a vlCDR3 having an amino acid sequence of a vlCDR1, a vlCDR2, and a vlCDR3, respectively, of a VL depicted in FIGS. 15, 17 or 82 or a variant thereof.

[0400] In some embodiments of the 2+1 mAb-scFv format, the anti-CD28 ABD has a VH and VL domain selected from the following:(i) a VH having an amino acid sequence of a VH of any of the CD28 binding domains depicted in FIGS. 15, 18, 21 and 65 or a variant thereof; and (ii) a VL having an amino acid sequence of the VL of the CD28 binding domain depicted in FIGS. 15, 18, 21 and 65 or a variant thereof; or(i) a VH having an amino acid sequence of a VH depicted in FIG. 15 or 16 or a variant thereof; and (ii) a VL having an amino acid sequence of a VL depicted in FIGS. 15, 17, or 82 or a variant thereof.

[0401] Any suitable STEAP1 binding domain can be included in subject 2+1 mAb-scFv format, including any of the STEAP1 binding domains provided herein. In some embodiments, the STEAP1 binding domain is one of the following STEAP1 binding domains or a variant thereof. H1 and L1, H1.1 and L1, H1.2 and L1, H1.3 and L1, H1.4 and L1, H1.5 and L1, H1.6 and L1, H1.7 and L1, H1.8 and L1, H1.9 and L1, H1.10 and L1, H1.II and L1, H1.12 and L1, H1.13 and L1, H1.14 and L1, H1.15 and L1, H1.16 and L1, H1.17 and L1, H1.18 and L1, H1.19 and L1, H1.20 and L1, H1.21 and L1, H1.22 and L1, H1.23 and L1, H1.24 and L1, H1.25 and L1, H1.26 and L1, H1.27 and L1, H1.28 and L1, H1.29 and L1, H1.30 and L1, H1.31 and L1, H1.32 and L1, H1.33 and L1, H1.34 and L1, H1.35 and L1, H1.36 and L1, H1.37 and L1, H1.38 and L1, H1 and L1.1, H1 and L1.2, H1 and L1.3, H0 and L0, H1.21 and L1.3, H1.34 and L1.3, H1.39 and L1, H1.40 and L1, H1.4I and L1, H1.42 and L1, H1.43 and L1, H1.44 and L1, H1.45 and L1, H1.46 and L1, H1.47 and L1, H1.48 and L1, H1.49 and L1, H1.50 and L1, H1.51 and L1, H1.52 and L1, H1.53 and L1, H1.54 and L1, H1.55 and L1, H1.56 and L1, H1.57 and L1, H1.58 and L1, H1.59 and L1, H1.60 and L1, H1.61 and L1, H1.62 and L1, H1.63 and L1, H1.64 and L1, H1.65 and L1, H1.66 and L1, H1.67 and L1, H1.68 and L1, H1.69 and L1, H1.70 and L1, H1.71 and L1, H1.72 and L1, H1.73 and L1, H1.74 and L1, H1.75 and L1, H1.76 and L1, H1.77 and L1, H1.78 and L1, H1.79 and L1, H1.80 and L1, H1.81 and L1, H1.82 and L1, H1.83 and L1, H1.84 and L1, H1.85 and L1, H1.86 and L1, H1.87 and L1, H1.88, and L1, H1.89 and L1, H1.90 and L1, H1.91 and L1, H1.92 and L1, H1.93 and L1, H1.94 and L1, H1.95 and L1, H1.96 and L1, H1.97 and L1, H1.98 and L1, H1.99 and L1, H1.100 and L1, H1.101 and L1, H1.102 and L1, H1.103 and L1, H1.104 and L1, H1.105 and L1, H1.106 and L1, H1.107 and L1, H1.108 and L1, H1.109 and L1, H1.110 and L1, H1.111 and L1, H1.112 and L1, H1.113 and L1, H1.114 and L1, H1.115 and L1, H1.116 and L1, H1.117 and L1, H1.118 and L1, H1.119 and L1, H1.120 and L1, H1.121 and L1, H1.122 and L1, H1.123 and L1, H1.124 and L1, H1.125 and L1, H1.126 and L1, H1.127 and L1, H1.128 and L1, H1.129 and L1, H1.130 and L1, H1.131 and L1, H1.132 and L1, H1.133 and L1, H1.134 and L1, H1.135 and L1, H1.136 and L1, H1.137 and L1, H1.138 and L1, H1.139 and L1, H1.140 and L1, H1.141 and L1, H1.142 and L1, H1.143 and L1, H1.144 and L1, H1.145 and L1, H1.146 and L1, H1.147 and L1, H1.148 and L1, H1.149 and L1, H1.150 and L1, H1.151 and L1, H1.152 and L1, H1.153 and L1, H1.154 and L1, H1.155 and L1, H1.156 and L1, H1.157 and L1, H1.158 and L1, H1.159 and L1, H1.160 and L1, H1.161 and L1, H1.162 and L1, H1.163 and L1, H1.164 and L1, H1.165 and L1, H1.166 and L1, H1.167 and L1, H1.168 and L1, H1.169 and L1, H1.170 and L1, H1.171 and L1, H1.172 and L1, H1.173 and L1, H1.174 and L1, H1.175 and L1, H1.176 and L1, H1.177 and L1, H1.178 and L1, H1.179 and L1, H1.180 and L1, H1.181 and L1, H1.182 and L1, H1.183 and L1, H1.184 and L1, H1.185 and L1, H1.186 and L1, H1.187 and L1, H1.188 and L1, H1.189 and L1, H1 and L1.4, H1 and L1.5, H1 and L1.6, H1 and L1.7, H1 and L1.8, H1 and L1.9, H1 and L1.10, H1 and L1.11, H1 and L1.12, H1 and L1.13, H1 and L1.14, H1 and L1.15, H1 and L1.16, H1 and L1.17, H1 and L1.18, H1 and L1.19, H1 and L1.20, H1 and L1.21, H1 and L1.22, H1 and L1.23, H1 and L1.24, H1 and L1.25, H1 and L1.26, H1 and L1.27, H1 and L1.28, H1 and L1.29, H1 and L1.30, H1 and L1.31, H1 and L1.32, H1 and L1.33, H1 and L1.34, H1 and L1.35, H1 and L1.36, H1 and L1.37, H1 and L1.38, H1 and L1.39, H1 and L1.40, H1 and L1.41, H1 and L1.42, H1 and L1.43, H1 and L1.44, H1 and L1.45, H1 and L1.46, H1 and L1.47, H1 and L1.48, H1 and L1.49, H1 and L1.50, H1 and L1.51, H1 and L1.52, H1 and L1.53, H1 and L1.54, H1 and L1.55, H1 and L1.56, H1 and L1.57, H1 and L1.58, H1 and L1.59, H1 and L1.60, H1 and L1.61, H1 and L1.62, H1 and L1.63, H1 and L1.64, H1 and L1.65, H1 and L1.66, H1 and L1.67, H1 and L1.68, H1 and L1.69, H1 and L1.70, H1 and L1.71, H1 and L1.72, H1 and L1.73, H1 and L1.74, H1 and L1.75, H1 and L1.76, H1 and L1.77, H1 and L1.78, H1 and L1.79, H1 and L1.80, H1 and L1.81, H1 and L1.82, H1 and L1.83, H1 and L1.84, H1 and L1.85, H1.42 and L1.47, H1.42 and L1.56, H1.190 and L1.3, H1.191 and L1.3, H1.192 and L1.3, H1.195 and L1.3, H1.196 and L1.3, H1.197 and L1.3, H1.198 and L1.3, H1.199 and L1.3, H1.200 and L1.3, H1.201 and L1.3, H1.202 and L1.3, H1.203 and L1.3, H1.204 and L1.3, H1.205 and L1.3, H1.206 and L1.3, H1.207 and L1.3, H1.208 and L1.3, H1.209 and L1.3, H1.210 and L1.3, H1.211 and L1.3, H1.212 and L1.3, H1.213 and L1.3, H1.214 and L1.3, H1.215 and L1.3, H1.216 and L1.3, H1.217 and L1.3, H1.218 and L1.3, H1.219 and L1.3, H1.220 and L1.3, H1.221 and L1.3, H1.222 and L1.3, H1.223 and L1.3, H1.224 and L1.3, H1.225 and L1.3, H1.226 and L1.3, H1.227 and L1.3, H1.228 and L1.3, H1.21 and L1.92, H1.21 and L1.93, H1.21 and L1.94, H1.21 and L1.95, H1.21 and L1.96, H1.21 and L1.97, H1.21 and L1.98, H1.21 and L1.99, H1.21 and L1.100, H1.21 and L1.101, H1.21 and L1.102, H1.21 and L1.103, H1.21 and L1.104, H1.21 and L1.105, H1.21 and L1.106, H1.21 and L1.107, H1.21 and L1.108, H1.21 and L1.109, H1.21 and L1.110, H1.21 and L1.111, H1.21 and L1.112, H1.21 and L1.113, H1.21 and L1.114, H1.21 and L1.115, H1.21 and L1.116, H1.21 and L1.117, H1.21 and L1.118, H1.21 and L1.119, H1.195 and L1.92, H1.195 and L1.94, H1.195 and L1.95, H1.195 and L1.104, H1.195 and L1.105, H1.195 and L1.109, H1.196 and L1.92, H1.196 and L1.94, H1.196 and L1.95, H1.196 and L1.104, H1.196 and L1.105, H1.196 and L1.109, H1.205 and L1.92, H1.205 and L1.94, H1.205 and L1.95, H1.205 and L1.104, H1.205 and L1.105, H1.205 and L1.109, H1.193 and L1.91, H1.194 and L1.86, H1.194 and L1.87, H1.194 and L1.88, H1.194 and L1.89, or H1.194 and L1.90, or H1.2320 and L1.100, or H1.230 and L1.115 (FIGS. 22, 31, 32 and 39). Additional VH and VL sequences of exemplary STEAP1 binding domains that can be used in the subject 2+1 mAb-scFv format antibody are depicted in FIGS. 22, 31, and 32.

[0402] In some embodiments of the 2+1 mAb-scFv format, the STEAP1 ABD has a VH and VL domain selected from the following: (i) a VH comprising a vhCDR1, a vhCDR2, and a vhCDR3 having an amino acid sequence of a vhCDR1, a vhCDR2, and a vhCDR3, respectively, of a VH of any of the STEAP1 binding domains depicted in FIG. 22, or a variant thereof; and (ii) a VL comprising a vlCDR1, a vlCDR2, and a vlCDR3 having an amino acid sequence of a vlCDR1, a vlCDR2, and a vlCDR3, respectively, of a VL of any of the STEAP1 binding domains depicted in FIG. 22, or a variant thereof; or (i) a VH comprising a vhCDR1, a vhCDR2, and a vhCDR3 having an amino acid sequence of a vhCDR1, a vhCDR2, and a vhCDR3, respectively, of a VH depicted in FIG. 22 or FIG. 31 or a variant thereof; and (ii) a VL comprising a vlCDR1, a vlCDR2, and a vlCDR3 having an amino acid sequence of a vlCDR1, a vlCDR2, and a vlCDR3, respectively, of a VL depicted in FIG. 22 or FIG. 32 or a variant thereof.

[0403] In some embodiments of the 2+1 mAb-scFv format, the STEAP1 ABD has a VH and VL domain selected from the following: (i) a VH having an amino acid sequence of any of the STEAP1 binding domains depicted in FIG. 22 or a variant thereof; and (ii) a VL having an amino acid sequence of a VL of any of the STEAP1 binding domains depicted in FIG. 22 or a variant thereof; or (i) a VH having an amino acid sequence of a VH depicted in FIG. 22 or FIG. 31 or a variant thereof; and (ii) a VL having an amino acid sequence of a VL depicted in FIG. 22 or FIG. 32 or a variant thereof.

[0404] FIG. 10 shows some exemplary Fc domain sequences that are useful in the 2+1 mAb-scFv format antibodies. In addition, FIGS. 11 and 12 provide exemplary CH1-hinge domains, CH1 domains, and hinge domains that can be included in the first or second monomer of the 2+1 mAb-scFv format. Further, FIG. 13 provides useful CL sequences that can be used with this format. 3. 2+1 Fab2-scFv-Fc format

[0405] One heterodimeric antibody format that finds particular use in subject anti-CD28 x anti-STEAP1 antibodies provided herein is the 2+1 Fab2-scFv-Fc format (also referred to as “central-scFv format”) shown in FIG. 14B. This antibody format includes three antigen binding domains: two Fab portions and an scFv that is inserted between the VH-CH1 and CH2-CH3 regions of one of the monomers. In some embodiments of this format, the Fab portions each bind STEAP1 and the “extra” scFv domain binds CD28. In some embodiments, the 2+1 Fab2-scFv-Fc format antibody is a trivalent antibody.

[0406] In some embodiments of the 2+1 Fab2-scFv-Fc format, a first monomer includes a standard heavy chain (i.e., VH1-CHT-hinge-CH2-CH3), wherein VH1 is a first variable heavy domain and CH2-CH3 is a first Fc domain. A second monomer includes another first variable heavy domain (VH1), a CH1 domain (and optional hinge), a second Fc domain, and an scFv that includes an scFv variable light domain (VL2), an scFv linker and a scFv variable heavy domain (VH2). The scFv is covalently attached between the C-terminus of the CH1 domain of the second monomer and the N-terminus of the second Fc domain using optional domain linkers (VHT-CHT-[optional linker]-VH2-scFv linker-VH2-[optional linker]-CH2-CH3, or the opposite orientation for the scFv, VH1-CHT-[optional linker]-VL2-scFv linker-VH2-[optional linker]-CH2-CH3). The optional linkers can be any suitable peptide linkers, including, for example, the domain linkers included in FIG. 7. This embodiment further utilizes a common light chain that includes a variable light domain (VL1) and a constant light domain (CL). In some embodiments, the format includes two identical common light chains (each VL1-CL), wherein each of the common light chains associates with one of the VH1-CHT of the first and second monomers to form two identical Fabs. In some embodiments, the identical Fabs each bind STEAP1 , and the scFv binds CD28.

[0407] As for many of the embodiments herein, these constructs can include skew variants, pI variants, ablation variants, additional Fc variants, etc. as desired and described herein.

[0408] In some embodiments, the first and second Fc domains of the 2+1 Fab2-scFv-Fc format antibody are variant Fc domains that include heterodimerization skew variants (e.g., a set of amino acid substitutions as shown in FIGS. 3 and 8). Particularly useful heterodimerization skew variants include S364K/E357Q: L368D/K370S; L368D/K370S: S364K; L368E/K370S: S364K; T411T/E360E/Q362E: D401K; L368D/K370S: S364K/E357L; K370S: S364K/E357Q; T366S/L368A/Y407V: T366W and T366S/L368A/Y407V/Y349C: T366W/S354C (EU numbering). In exemplary embodiments, one of the first or second variant Fc domains includes heterodimerization skew variants L368D/K370S and the other of the first or second variant Fc domains includes heterodimerization skew variants S364K/E357Q, wherein numbering is according to EU numbering. In exemplary embodiments, the first variant Fc domain includes heterodimerization skew variants L368D/K370S and the second variant Fc domain includes heterodimerization skew variants S364K/E357Q, wherein numbering is according to EU numbering.

[0409] In some embodiments, the variant Fe domains include ablation variants (including those shown in FIG. 5). In some embodiments, each of the first and second variant Fc domains include ablation variants E233P/L234V/L235A/G236del/S267K, wherein numbering is according to EU numbering.

[0410] In some embodiments, the constant domain (CH1-hinge-CH2-CH3) of the first monomer includes pI variants (including those shown in FIGS. 3 and 4). In exemplary embodiments, the constant domain (CH1-hinge-CH2-CH3) of the first monomer includes pI variants N208D/Q295E/N384D/Q418E/N421D, wherein numbering is according to EU numbering.

[0411] In some embodiments, the scFv of the 2+1 Fab2-scFv-Fc format antibody provided herein includes a charged scFv linker (including those shown in FIG. 6). In some embodiments, the 2+1 Fab2-scFv-Fc format antibody provided herein includes FcRn variants M428L/N434S, wherein numbering is according to EU numbering.

[0412] In exemplary embodiments 2+1 Fab2-scFv-Fc format antibody includes a combination of amino acid modifications as depicted in FIG. 8. In such embodiments, the first variant Fc domain includes heterodimerization skew variants L368D/K370S and the second variant Fc domain includes heterodimerization skew variants S364K/E357Q; each of the first and second variant Fc domains include ablation variants E233P/L234V/L235A/G236del/S267K; and the constant domain (CH1-hinge-CH2-CH3) of the first monomer includes pI variants N208D/Q295E/N384D/Q418E/N421D, wherein numbering is according to EU numbering. In some embodiments, the scFv of the 2+1 Fab2-scFv-Fc format antibody provided herein includes a (GKPGS)₄ charged scFv linker (SEQ ID NO: 24). In some embodiments, the 2+1 Fab2-scFv-Fc format antibody provided herein includes FcRn variants M428L/N434S, wherein numbering is according to EU numbering.

[0413] In some embodiments, the CH1-hinge-CH2-CH3 of the first monomer comprises amino acid variants L368D/K370S/N208D/Q295E/N384D/Q418E/N421D/E233P/L234V/L235A/G236del/S267 K, and the second Fc domain comprises amino acid variants S364K/E357Q/E233P/L234V/L235A/G236del/S267K, wherein numbering is according to EU numbering.

[0414] In some embodiments, the scFv of the second monomer of the 2+1 Fab2-scFv-Fc format antibody is a CD28 binding domain and the VH1 of the first and second monomer and the VL1 of the common light chain each form binding domains that bind STEAP1 . Any suitable CD28 binding domain can be included in subject 2+1 Fab2-scFv-Fc format antibody, including any of the CD28 binding domains provided herein. In some embodiments, the CD28 binding domain is one of the following CD28 binding domains or a variant thereof: IA7[CD28]_H1L1, IA7[CD28]_H1.1_L1, IA7[CD28]_H1_L1.71, IA7[CD28]_H1.1_L1.71, IA7[CD28]H1.14_L1, IA7[CD28]_H1.14_L1.71, CD28.3[CD28]_H0L0, hCD28.3[CD28]_H1L1, 5.11A1[CD28]_H0L0, TGN1412_H1L1, 341VL34[CD28]H1L1, 341VL36[CD28]_H1L1, 281VL4[CD28]_H1L1, HuTN228[CD28]_H1L1, PV1[CD28]H0L0, m9.3[CD28]_H0L0, hu9.3[CD28]_H1L1, 9G2[CD28]_H0L0, 9G2[CD28]_H1L1, 2F10A3.140[CD28]_H1L1, TN228[CD28]_H4L2, IA7[CD28]_H1.1_L1 [S-S], IA7[CD28]_H1_L1.71 [S-S], IA7[CD28]_H1.1_L1.71 [S-S], IA7[CD28]_H1.14_L1 [S-S], IA7[CD28]_H1.14_L1.71 [S-S], IA7[CD28]_H1.129_L1.71 [S-S], 1A7[CD28]_H1.106_L1.71 [S-S], 1A7[CD28]_H1.129_L1 [S-S], and 1A7[CD28]_H1.106_L1 [S-S](FIGS. 15, 18, 21 and 65).

[0415] In some embodiments of the 2+1 Fab2-scFv-Fc format, the anti-CD28 ABD has a VH and VL domain selected from the following:(i) a VH comprising a vhCDR1, a vhCDR2, and a vhCDR3 having an amino acid sequence of a vhCDR1, a vhCDR2, and a vhCDR3, respectively, of a VH of any of the CD28 binding domains depicted in FIGS. 15, 18, 21 and 65 or a variant thereof; and (ii) a VL comprising a vlCDR1, a vlCDR2, and a vlCDR3 having an amino acid sequence of a vlCDR1, a vlCDR2, and a vlCDR3, respectively, of the VL of the CD28 binding domain depicted in FIGS. 15, 18, 21 and 65 or a variant thereof; or(i) a VH comprising a vhCDR1, a vhCDR2, and a vhCDR3 having an amino acid sequence of a vhCDR1, a vhCDR2, and a vhCDR3, respectively, of a VH depicted in FIG. 15 or 16 or a variant thereof; and (ii) a VL comprising a vlCDR1, a vlCDR2, and a vlCDR3 having an amino acid sequence of a vlCDR1, a vlCDR2, and a vlCDR3, respectively, of a VL depicted in FIGS. 15, 17, or 82 or a variant thereof.

[0416] In some embodiments of the 2+1 Fab2-scFv-Fc format, the anti-CD28 ABD has a VH and VL domain selected from the following:(i) a VH having an amino acid sequence of a VH of any of the CD28 binding domains depicted in FIGS. 15, 18, 21 and 65 or a variant thereof; and (ii) a VL having an amino acid sequence of the VL of the CD28 binding domain depicted in FIGS. 15, 18, 21 and 65 or a variant thereof; or(i) a VH having an amino acid sequence of a VH depicted in FIG. 15 or 16 or a variant thereof; and (ii) a VL having an amino acid sequence of a VL depicted in FIGS. 15, 17, or 82 or a variant thereof.

[0417] In some embodiments, the VH1 of the first and second monomer and the VL1 of the common light chain of the 2+1 Fab2-scFv-Fc format antibody each form a binding domain that binds STEAP1 . Any suitable STEAP1 binding domain can be included in subject 2+1 Fab2-scFv-Fc, including any of the STEAP1 binding domains provided herein. In some embodiments, the STEAP1 binding domain is one of the following STEAP1 binding domains or a variant thereof. H1 and L1, H1.1 and L1, H1.2 and L1, H1.3 and L1, H1.4 and L1, H1.5 and L1, H1.6 and L1, H1.7 and L1, H1.8 and L1, H1.9 and L1, H1.10 and L1, H1.II and L1, H1.12 and L1, H1.13 and L1, H1.14 and L1, H1.15 and L1, H1.16 and L1, H1.17 and L1, H1.18 and L1, H1.19 and L1, H1.20 and L1, H1.21 and L1, H1.22 and L1, H1.23 and L1, H1.24 and L1, H1.25 and L1, H1.26 and L1, H1.27 and L1, H1.28 and L1, H1.29 and L1, H1.30 and L1, H1.31 and L1, H1.32 and L1, H1.33 and L1, H1.34 and L1, H1.35 and L1, H1.36 and L1, H1.37 and L1, H1.38 and L1, H1 and L1.1, H1 and L1.2, H1 and L1.3, H0 and L0, H1.21 and L1.3, H1.34 and L1.3, H1.39 and L1, H1.40 and L1, H1.4I and L1, H1.42 and L1, H1.43 and L1, H1.44 and L1, H1.45 and L1, H1.46 and L1, H1.47 and L1, H1.48 and L1, H1.49 and L1, H1.50 and L1, H1.51 and L1, H1.52 and L1, H1.53 and L1, H1.54 and L1, H1.55 and L1, H1.56 and L1, H1.57 and L1, H1.58 and L1, H1.59 and L1, H1.60 and L1, H1.61 and L1, H1.62 and L1, H1.63 and L1, H1.64 and L1, H1.65 and L1, H1.66 and L1, H1.67 and L1, H1.68 and L1, H1.69 and L1, H1.70 and L1, H1.71 and L1, H1.72 and L1, H1.73 and L1, H1.74 and L1, H1.75 and L1, H1.76 and L1, H1.77 and L1, H1.78 and L1, H1.79 and L1, H1.80 and L1, H1.81 and L1, H1.82 and L1, H1.83 and L1, H1.84 and L1, H1.85 and L1, H1.86 and L1, H1.87 and L1, H1.88, and L1, H1.89 and L1, H1.90 and L1, H1.91 and L1, H1.92 and L1, H1.93 and L1, H1.94 and L1, H1.95 and L1, H1.96 and L1, H1.97 and L1, H1.98 and L1, H1.99 and L1, H1.100 and L1, H1.101 and L1, H1.102 and L1, H1.103 and L1, H1.104 and L1, H1.105 and L1, H1.106 and L1, H1.107 and L1, H1.108 and L1, H1.109 and L1, H1.110 and L1, H1.111 and L1, H1.112 and L1, H1.113 and L1, H1.114 and L1, H1.115 and L1, H1.116 and L1, H1.117 and L1, H1.118 and L1, H1.119 and L1, H1.120 and L1, H1.121 and L1, H1.122 and L1, H1.123 and L1, H1.124 and L1, H1.125 and L1, H1.126 and L1, H1.127 and L1, H1.128 and L1, H1.129 and L1, H1.130 and L1, H1.131 and L1, H1.132 and L1, H1.133 and L1, H1.134 and L1, H1.135 and L1, H1.136 and L1, H1.137 and L1, H1.138 and L1, H1.139 and L1, H1.140 and L1, H1.141 and L1, H1.142 and L1, H1.143 and L1, H1.144 and L1, H1.145 and L1, H1.146 and L1, H1.147 and L1, H1.148 and L1, H1.149 and L1, H1.150 and L1, H1.151 and L1, H1.152 and L1, H1.153 and L1, H1.154 and L1, H1.155 and L1, H1.156 and L1, H1.157 and L1, H1.158 and L1, H1.159 and L1, H1.160 and L1, H1.161 and L1, H1.162 and L1, H1.163 and L1, H1.164 and L1, H1.165 and L1, H1.166 and L1, H1.167 and L1, H1.168 and L1, H1.169 and L1, H1.170 and L1, H1.171 and L1, H1.172 and L1, H1.173 and L1, H1.174 and L1, H1.175 and L1, H1.176 and L1, H1.177 and L1, H1.178 and L1, H1.179 and L1, H1.180 and L1, H1.181 and L1, H1.182 and L1, H1.183 and L1, H1.184 and L1, H1.185 and L1, H1.186 and L1, H1.187 and L1, H1.188 and L1, H1.189 and L1, H1 and L1.4, H1 and L1.5, H1 and L1.6, H1 and L1.7, H1 and L1.8, H1 and L1.9, H1 and L1.10, H1 and L1.11, H1 and L1.12, H1 and L1.13, H1 and L1.14, H1 and L1.15, H1 and L1.16, H1 and L1.17, H1 and L1.18, H1 and L1.19, H1 and L1.20, H1 and L1.21, H1 and L1.22, H1 and L1.23, H1 and L1.24, H1 and L1.25, H1 and L1.26, H1 and L1.27, H1 and L1.28, H1 and L1.29, H1 and L1.30, H1 and L1.31, H1 and L1.32, H1 and L1.33, H1 and L1.34, H1 and L1.35, H1 and L1.36, H1 and L1.37, H1 and L1.38, H1 and L1.39, H1 and L1.40, H1 and L1.41, H1 and L1.42, H1 and L1.43, H1 and L1.44, H1 and L1.45, H1 and L1.46, H1 and L1.47, H1 and L1.48, H1 and L1.49, H1 and L1.50, H1 and L1.51, H1 and L1.52, H1 and L1.53, H1 and L1.54, H1 and L1.55, H1 and L1.56, H1 and L1.57, H1 and L1.58, H1 and L1.59, H1 and L1.60, H1 and L1.61, H1 and L1.62, H1 and L1.63, H1 and L1.64, H1 and L1.65, H1 and L1.66, H1 and L1.67, H1 and L1.68, H1 and L1.69, H1 and L1.70, H1 and L1.71, H1 and L1.72, H1 and L1.73, H1 and L1.74, H1 and L1.75, H1 and L1.76, H1 and L1.77, H1 and L1.78, H1 and L1.79, H1 and L1.80, H1 and L1.81, H1 and L1.82, H1 and L1.83, H1 and L1.84, H1 and L1.85, H1.42 and L1.47, H1.42 and L1.56, H1.190 and L1.3, H1.191 and L1.3, H1.192 and L1.3, H1.195 and L1.3, H1.196 and L1.3, H1.197 and L1.3, H1.198 and L1.3, H1.199 and L1.3, H1.200 and L1.3, H1.201 and L1.3, H1.202 and L1.3, H1.203 and L1.3, H1.204 and L1.3, H1.205 and L1.3, H1.206 and L1.3, H1.207 and L1.3, H1.208 and L1.3, H1.209 and L1.3, H1.210 and L1.3, H1.211 and L1.3, H1.212 and L1.3, H1.213 and L1.3, H1.214 and L1.3, H1.215 and L1.3, H1.216 and L1.3, H1.217 and L1.3, H1.218 and L1.3, H1.219 and L1.3, H1.220 and L1.3, H1.221 and L1.3, H1.222 and L1.3, H1.223 and L1.3, H1.224 and L1.3, H1.225 and L1.3, H1.226 and L1.3, H1.227 and L1.3, H1.228 and L1.3, H1.21 and L1.92, H1.21 and L1.93, H1.21 and L1.94, H1.21 and L1.95, H1.21 and L1.96, H1.21 and L1.97, H1.21 and L1.98, H1.21 and L1.99, H1.21 and L1.100, H1.21 and L1.101, H1.21 and L1.102, H1.21 and L1.103, H1.21 and L1.104, H1.21 and L1.105, H1.21 and L1.106, H1.21 and L1.107, H1.21 and L1.108, H1.21 and L1.109, H1.21 and L1.110, H1.21 and L1.111, H1.21 and L1.112, H1.21 and L1.113, H1.21 and L1.114, H1.21 and L1.115, H1.21 and L1.116, H1.21 and L1.117, H1.21 and L1.118, H1.21 and L1.119, H1.195 and L1.92, H1.195 and L1.94, H1.195 and L1.95, H1.195 and L1.104, H1.195 and L1.105, H1.195 and L1.109, H1.196 and L1.92, H1.196 and L1.94, H1.196 and L1.95, H1.196 and L1.104, H1.196 and L1.105, H1.196 and L1.109, H1.205 and L1.92, H1.205 and L1.94, H1.205 and L1.95, H1.205 and L1.104, H1.205 and L1.105, H1.205 and L1.109, H1.193 and L1.91, H1.194 and L1.86, H1.194 and L1.87, H1.194 and L1.88, H1.194 and L1.89, or H1.194 and L1.90, or H1.2320 and L1.100, or H1.230 and L1.115 (FIGS. 22, 31, 32 and 39). Additional VH and VL sequences of exemplary STEAP1 binding domains that can be used in the subject 2+1 Fab2-scFv-Fc format antibody are depicted in FIGS. 22, 31, and 32.

[0418] In some embodiments of the 2+1 Fab2-scFv-Fc format, the STEAP1 ABDs each include a VH and VL domain selected from the following: (i) a VH comprising a vhCDR1, a vhCDR2, and a vhCDR3 having an amino acid sequence of a vhCDR1, a vhCDR2, and a vhCDR3, respectively, of a VH of any of the STEAP1 binding domains depicted in FIG. 22 or a variant thereof; and (ii) a VL comprising a vlCDR1, a vlCDR2, and a vlCDR3 having an amino acid sequence of a vlCDR1, a vlCDR2, and a vlCDR3, respectively, of a VL of any of the STEAP1 binding domains depicted in FIG. 22 or a variant thereof; or (i) a VH comprising a vhCDR1, a vhCDR2, and a vhCDR3 having an amino acid sequence of a vhCDR1, a vhCDR2, and a vhCDR3, respectively, of a VH depicted in FIG. 22 or FIG. 31 or a variant thereof; and (ii) a VL comprising a vlCDR1, a vlCDR2, and a vlCDR3 having an amino acid sequence of a vlCDR1, a vlCDR2, and a vlCDR3, respectively, of a VL depicted in FIG. 22 or FIG. 32 or a variant thereof.

[0419] In some embodiments of the 2+1 Fab2-scFv-Fc format, the STEAP1 ABDs each include a VH and VL domain selected from the following: (i) a VH having an amino acid sequence of any of the VH of any of the STEAP1 binding domains depicted in FIG. 22 or a variant thereof; and (ii) a VL having an amino acid sequence of a VL of any of the STEAP1 binding domains depicted in FIG. 22 or a variant thereof; or (i) a VH having an amino acid sequence of a VH depicted in FIG. 22 or FIG. 31, or a variant thereof; and (ii) a VL having an amino acid sequence of a VL depicted in FIG. 22 or FIG. 32 or a variant thereof.

[0420] FIG. 9 shows some exemplary Fc domain sequences that are useful in the 2 +1 Fab2-scFv-Fc format antibodies. In addition, FIGS. 11 and 12 provide exemplary CH1-hinge domains, CH1 domains, and hinge domains that can be included in the first or second monomer of the 2+1 Fab2-scFv-Fc format. Further, FIG. 13 provides useful CL sequences that can be used with this format.

[0421] Exemplary anti-CD28 x anti-STEAP1 bispecific antibodies in the 2+1 Fab2-scFv-Fc format are depicted in FIG. 40. 4. 2+1 Fab2-Fc x scFv-Fc format

[0422] One heterodimeric antibody format that finds particular use in the subject anti-CD28 x anti-STEAP1 antibodies provided herein is the 2+1 Fab2-Fc x scFv-Fc format (also referred to as “stacked bottle opener”) shown in FIG. 14F. This format includes a first monomer, a second monomer and a common light chain. The first monomer includes, from N- to C-terminus: a VH1-CH1-domain linker-VH1-CH1-hinge-CH2-CH3, wherein the VH1s are each a first variable heavy domain and the CH2-CH3 is a first variant Fc domain. The domain linker can be any useful domain linker (see, e.g., FIG. 7). The second monomer includes a single-chain Fv (“scFv”) covalently attached to a second variant Fc domain by a domain linker (scFv-domain linker-CH2-CH3). The common light chain includes a VL1-CL wherein the VL1 is a first variable light domain. The scFv of the second monomer includes a second variable heavy domain (VH2) attached to a second variable light domain (VL2) by an scFv linker. In some embodiments, this format includes two identical common light chains (VL1-CL). In this embodiment, the two VH1-CH1s of the first monomer each interact with a common light chain to form two identical Fabs that are first antigen binding domains, and the VH2 and VL2 form a second antigen binding domain. In some embodiments, each of the first antigen binding domains are STEAP1 binding domains, and the second antigen binding domain is a CD28 binding domain. As for many of the embodiments herein, these constructs can include skew variants, pI variants, ablation variants, additional Fc variants, etc. as desired and described herein.

[0423] In some embodiments, the first and second Fc domains of the 2+1 Fab2-Fc x scFv-Fc format antibody are variant Fc domains that include heterodimerization skew variants (e.g., a set of amino acid substitutions as shown in FIGS. 3 and 8). Particularly useful heterodimerization skew variants include S364K/E357Q: L368D/K370S; L368D/K370S: S364K; L368E/K370S: S364K; T411T/E360E/Q362E: D401K; L368D/K370S: S364K/E357L; K370S: S364K/E357Q; T366S/L368A/Y407V: T366W and T366S/L368A/Y407V/Y349C: T366W/S354C (EU numbering). In exemplary embodiments, one of the first or second variant Fc domains includes heterodimerization skew variants L368D/K370S and the other of the first or second variant Fc domains includes heterodimerization skew variants S364K/E357Q, wherein numbering is according to EU numbering. In exemplary embodiments, the first variant Fc domain includes heterodimerization skew variants L368D/K370S and the second variant Fc domain includes heterodimerization skew variants S364K/E357Q, wherein numbering is according to EU numbering.

[0424] In some embodiments, the variant Fe domains include ablation variants (including those shown in FIG. 5). In some embodiments, each of the first and second variant Fc domains include ablation variants E233P/L234V/L235A/G236del/S267K, wherein numbering is according to EU numbering.

[0425] In some embodiments, the constant domain (CH1-hinge-CH2-CH3) of the first monomer includes pI variants (including those shown in FIGS. 3 and 4). In exemplary embodiments, the constant domain (CH1-hinge-CH2-CH3) of the first monomer includes pI variants N208D/Q295E/N384D/Q418E/N421D, wherein numbering is according to EU numbering.

[0426] In some embodiments, the 2+1 Fab2-Fc x scFv-Fc format antibody provided herein includes a charged scFv linker (including those shown in FIG. 6). In some embodiments, the 2+1 Fab2-scFv-Fc format antibody provided herein includes FcRn variants M428L/N434S, wherein numbering is according to EU numbering.

[0427] In exemplary embodiments, the 2+1 Fab2-Fc x scFv-Fc format antibody includes a combination of amino acid modifications as depicted in FIG. 8. In such embodiments, the first variant Fc domain includes heterodimerization skew variants L368D/K370S and the second variant Fc domain includes heterodimerization skew variants S364K/E357Q; each of the first and second variant Fc domains include ablation variants E233P/L234V/L235A/G236del/S267K; and the constant domain (CH1-hinge-CH2-CH3) of the first monomer includes pI variants N208D/Q295E/N384D/Q418E/N421D, wherein numbering is according to EU numbering. In some embodiments, the scFv of the 2+1 Fab2-Fc x scFv-Fc format antibody provided herein includes a (GKPGS)₄ charged scFv linker (SEQ ID NO: 24). In some embodiments, the 2+1 Fab2-Fc x scFv-Fc format antibody provided herein includes FcRn variants M428L/N434S, wherein numbering is according to EU numbering.

[0428] In some embodiments, the CH1-hinge-CH2-CH3 of the first monomer comprises amino acid variants L368D/K370S/N208D/Q295E/N384D/Q418E/N421D/E233P/L234V/L235A/G236del/S267 K, and the second Fc domain comprises amino acid variants S364K/E357Q/E233P/L234V/L235A/G236del/S267K, wherein numbering is according to EU numbering.

[0429] In some embodiments, the scFv of the second monomer of the 2+1 Fab2-Fc x scFv-Fc format antibody is a CD28 binding domain and the VH1 of the first and second monomer and the VL1 of the common light chain each form binding domains that bind STEAP1 . Any suitable CD28 binding domain can be included in subject 2+1 Fab2-scFv-Fc format antibody, including any of the CD28 binding domains provided herein. In some embodiments, the CD28 binding domain is one of the following CD28 binding domains or a variant thereof: IA7[CD28]_H1L1, IA7[CD28]_H1.1_L1, IA7[CD28]_H1_L1.71, IA7[CD28]_H1.1_L1.71, IA7[CD28]H1.14_L1, IA7[CD28]_H1.14_L1.71, CD28.3[CD28]_H0L0, hCD28.3[CD28]_H1L1, 5.11A1[CD28]_H0L0, TGN1412_H1L1, 341VL34[CD28]H1L1, 341VL36[CD28]_H1L1, 281VL4[CD28]_H1L1, HuTN228[CD28]_H1L1, PV1[CD28]H0L0, m9.3[CD28]_H0L0, hu9.3[CD28]_H1L1, 9G2[CD28]_H0L0, 9G2[CD28]_H1L1, 2F10A3.140[CD28]_H1L1, TN228[CD28]_H4L2, IA7[CD28]_H1.1_L1 [S-S], IA7[CD28]_H1_L1.71 [S-S], IA7[CD28]_H1.1_L1.71 [S-S], IA7[CD28]_H1.14_L1 [S-S], IA7[CD28]_H1.14_L1.71 [S-S], IA7[CD28]_H1.129_L1.71 [S-S], 1A7[CD28]_H1.106_L1.71 [S-S], 1A7[CD28]_H1.129_L1 [S-S], and 1A7[CD28]_H1.106_L1 [S-S](FIGS. 15, 18, 21 and 65).

[0430] In some embodiments of the 2+1 Fab2-Fc x scFv-Fc format, the anti-CD28 ABD has a VH and VL domain selected from the following: (i) a VH comprising a vhCDR1, a vhCDR2, and a vhCDR3 having an amino acid sequence of a vhCDR1, a vhCDR2, and a vhCDR3, respectively, of a VH of any of the CD28 binding domains depicted in FIGS. 15, 18, 21 and 65 or a variant thereof; and (ii) a VL comprising a vlCDR1, a vlCDR2, and a vlCDR3 having an amino acid sequence of a vlCDR1, a vlCDR2, and a vlCDR3, respectively, of the VL of the CD28 binding domain depicted in FIGS. 15, 18, 21 and 65 or a variant thereof; or (i) a VH comprising a vhCDR1, a vhCDR2, and a vhCDR3 having an amino acid sequence of a vhCDR1, a vhCDR2, and a vhCDR3, respectively, of a VH depicted in FIG. 15 or 16 or a variant thereof; and (ii) a VL comprising a vlCDR1, a vlCDR2, and a vlCDR3 having an amino acid sequence of a vlCDR1, a vlCDR2, and a vlCDR3, respectively, of a VL depicted in FIGS. 15, 17, or 82 or a variant thereof.

[0431] In some embodiments of the 2+1 Fab2-Fc x scFv-Fc, the anti-CD28 ABD has a VH and VL domain selected from the following:(i) a VH having an amino acid sequence of a VH of any of the CD28 binding domains depicted in FIGS. 15, 18, 21 and 65 or a variant thereof; and (ii) a VL having an amino acid sequence of the VL of the CD28 binding domains depicted in FIGS. 15, 18, 21 and 65 or a variant thereof; or (i) a VH having an amino acid sequence of a VH depicted in FIG. 15 or 16 or a variant thereof; and (ii) a VL having an amino acid sequence of a VL depicted in FIGS. 15, 17, or 82 or a variant thereof.

[0432] In some embodiments, the VH1 of the first and second monomer and the VL1 of the common light chain of the 2+1 Fab2-Fc x scFv-Fc format antibody each form a binding domain that binds STEAP1 . Any suitable STEAP1 binding domain can be included in subject 2+1 Fab2-Fc x scFv-Fc, including any of the STEAP1 binding domains provided herein. In some embodiments, the STEAP1 binding domain is one of the following STEAP1 binding domains or a variant thereof. H1 and L1, H1.1 and L1, H1.2 and L1, H1.3 and L1, H1.4 and L1, H1.5 and L1, H1.6 and L1, H1.7 and L1, H1.8 and L1, H1.9 and L1, H1.10 and L1, H1.11 and L1, H1.12 and L1, H1.13 and L1, H1.14 and L1, H1.15 and L1, H1.16 and L1, H1.17 and L1, H1.18 and L1, H1.19 and L1, H1.20 and L1, H1.21 and L1, H1.22 and L1, H1.23 and L1, H1.24 and L1, H1.25 and L1, H1.26 and L1, H1.27 and L1, H1.28 and L1, H1.29 and L1, H1.30 and L1, H1.31 and L1, H1.32 and L1, H1.33 and L1, H1.34 and L1, H1.35 and L1, H1.36 and L1, H1.37 and L1, H1.38 and L1, H1 and L1.1, H1 and L1.2, H1 and L1.3, H0 and L0, H1.21 and L1.3, H1.34 and L1.3, H1.39 and L1, H1.40 and L1, H1.4I and L1, H1.42 and L1, H1.43 and L1, H1.44 and L1, H1.45 and L1, H1.46 and L1, H1.47 and L1, H1.48 and L1, H1.49 and L1, H1.50 and L1, H1.51 and L1, H1.52 and L1, H1.53 and L1, H1.54 and L1, H1.55 and L1, H1.56 and L1, H1.57 and L1, H1.58 and L1, H1.59 and L1, H1.60 and L1, H1.61 and L1, H1.62 and L1, H1.63 and L1, H1.64 and L1, H1.65 and L1, H1.66 and L1, H1.67 and L1, H1.68 and L1, H1.69 and L1, H1.70 and L1, H1.71 and L1, H1.72 and L1, H1.73 and L1, H1.74 and L1, H1.75 and L1, H1.76 and L1, H1.77 and L1, H1.78 and L1, H1.79 and L1, H1.80 and L1, H1.81 and L1, H1.82 and L1, H1.83 and L1, H1.84 and L1, H1.85 and L1, H1.86 and L1, H1.87 and L1, H1.88, and L1, H1.89 and L1, H1.90 and L1, H1.91 and L1, H1.92 and L1, H1.93 and L1, H1.94 and L1, H1.95 and L1, H1.96 and L1, H1.97 and L1, H1.98 and L1, H1.99 and L1, H1.100 and L1, H1.101 and L1, H1.102 and L1, H1.103 and L1, H1.104 and L1, H1.105 and L1, H1.106 and L1, H1.107 and L1, H1.108 and L1, H1.109 and L1, H1.110 and L1, H1.III and L1, H1.112 and L1, H1.113 and L1, H1.114 and L1, H1.115 and L1, H1.116 and L1, H1.117 and L1, H1.118 and L1, H1.119 and L1, H1.120 and L1, H1.121 and L1, H1.122 and L1, H1.123 and L1, H1.124 and L1, H1.125 and L1, H1.126 and L1, H1.127 and L1, H1.128 and L1, H1.129 and L1, H1.130 and L1, H1.131 and L1, H1.132 and L1, H1.133 and L1, H1.134 and L1, H1.135 and L1, H1.136 and L1, H1.137 and L1, H1.138 and L1, H1.139 and L1, H1.140 and L1, H1.141 and L1, H1.142 and L1, H1.143 and L1, H1.144 and L1, H1.145 and L1, H1.146 and L1, H1.147 and L1, H1.148 and L1, H1.149 and L1, H1.150 and L1, H1.151 and L1, H1.152 and L1, H1.153 and L1, H1.154 and L1, H1.155 and L1, H1.156 and L1, H1.157 and L1, H1.158 and L1, H1.159 and L1, H1.160 and L1, H1.161 and L1, H1.162 and L1, H1.163 and L1, H1.164 and L1, H1.165 and L1, H1.166 and L1, H1.167 and L1, H1.168 and L1, H1.169 and L1, H1.170 and L1, H1.171 and L1, H1.172 and L1, H1.173 and L1, H1.174 and L1, H1.175 and L1, H1.176 and L1, H1.177 and L1, H1.178 and L1, H1.179 and L1, H1.180 and L1, H1.181 and L1, H1.182 and L1, H1.183 and L1, H1.184 and L1, H1.185 and L1, H1.186 and L1, H1.187 and L1, H1.188 and L1, H1.189 and L1, H1 and L1.4, H1 and L1.5, H1 and L1.6, H1 and L1.7, H1 and L1.8, H1 and L1.9, H1 and L1.10, H1 and L1.11, H1 and L1.12, H1 and L1.13, H1 and L1.14, H1 and L1.15, H1 and L1.16, H1 and L1.17, H1 and L1.18, H1 and L1.19, H1 and L1.20, H1 and L1.21, H1 and L1.22, H1 and L1.23, H1 and L1.24, H1 and L1.25, H1 and L1.26, H1 and L1.27, H1 and L1.28, H1 and L1.29, H1 and L1.30, H1 and L1.31, H1 and L1.32, H1 and L1.33, H1 and L1.34, H1 and L1.35, H1 and L1.36, H1 and L1.37, H1 and L1.38, H1 and L1.39, H1 and L1.40, H1 and L1.41, H1 and L1.42, H1 and L1.43, H1 and L1.44, H1 and L1.45, H1 and L1.46, H1 and L1.47, H1 and L1.48, H1 and L1.49, H1 and L1.50, H1 and L1.51, H1 and L1.52, H1 and L1.53, H1 and L1.54, H1 and L1.55, H1 and L1.56, H1 and L1.57, H1 and L1.58, H1 and L1.59, H1 and L1.60, H1 and L1.61, H1 and L1.62, H1 and L1.63, H1 and L1.64, H1 and L1.65, H1 and L1.66, H1 and L1.67, H1 and L1.68, H1 and L1.69, H1 and L1.70, H1 and L1.71, H1 and L1.72, H1 and L1.73, H1 and L1.74, H1 and L1.75, H1 and L1.76, H1 and L1.77, H1 and L1.78, H1 and L1.79, H1 and L1.80, H1 and L1.81, H1 and L1.82, H1 and L1.83, H1 and L1.84, H1 and L1.85, H1.42 and L1.47, H1.42 and L1.56, H1.190 and L1.3, H1.191 and L1.3, H1.192 and L1.3, H1.195 and L1.3, H1.196 and L1.3, H1.197 and L1.3, H1.198 and L1.3, H1.199 and L1.3, H1.200 and L1.3, H1.201 and L1.3, H1.202 and L1.3, H1.203 and L1.3, H1.204 and L1.3, H1.205 and L1.3, H1.206 and L1.3, H1.207 and L1.3, H1.208 and L1.3, H1.209 and L1.3, H1.210 and L1.3, H1.211 and L1.3, H1.212 and L1.3, H1.213 and L1.3, H1.214 and L1.3, H1.215 and L1.3, H1.216 and L1.3, H1.217 and L1.3, H1.218 and L1.3, H1.219 and L1.3, H1.220 and L1.3, H1.221 and L1.3, H1.222 and L1.3, H1.223 and L1.3, H1.224 and L1.3, H1.225 and L1.3, H1.226 and L1.3, H1.227 and L1.3, H1.228 and L1.3, H1.21 and L1.92, H1.21 and L1.93, H1.21 and L1.94, H1.21 and L1.95, H1.21 and L1.96, H1.21 and L1.97, H1.21 and L1.98, H1.21 and L1.99, H1.21 and L1.100, H1.21 and L1.101, H1.21 and L1.102, H1.21 and L1.103, H1.21 and L1.104, H1.21 and L1.105, H1.21 and L1.106, H1.21 and L1.107, H1.21 and L1.108, H1.21 and L1.109, H1.21 and L1.110, H1.21 and L1.111, H1.21 and L1.112, H1.21 and L1.113, H1.21 and L1.114, H1.21 and L1.115, H1.21 and L1.116, H1.21 and L1.117, H1.21 and L1.118, H1.21 and L1.119, H1.195 and L1.92, H1.195 and L1.94, H1.195 and L1.95, H1.195 and L1.104, H1.195 and L1.105, H1.195 and L1.109, H1.196 and L1.92, H1.196 and L1.94, H1.196 and L1.95, H1.196 and L1.104, H1.196 and L1.105, H1.196 and L1.109, H1.205 and L1.92, H1.205 and L1.94, H1.205 and L1.95, H1.205 and L1.104, H1.205 and L1.105, H1.205 and L1.109, H1.193 and L1.91, H1.194 and L1.86, H1.194 and L1.87, H1.194 and L1.88, H1.194 and L1.89, or H1.194 and L1.90, or H1.2320 and L1.100, or H1.230 and L1.115 (FIGS. 22, 31, 32 and 39). Additional VH and VL sequences of exemplary STEAP1 binding domains that can be used in the subject 2+1 Fab2-Fc x scFv-Fc format antibody are depicted in FIGS. 22, 31, and 32.

[0433] In some embodiments of the 2+1 Fab2-Fc x scFv-Fc format, the STEAP1 ABDs each include a VH and VL domain selected from the following: (i) a VH comprising a vhCDR1, a vhCDR2, and a vhCDR3 having an amino acid sequence of a vhCDR1, a vhCDR2, and a vhCDR3, respectively, of a VH of any of the STEAP1 binding domains depicted in FIG. 22 or a variant thereof; and (ii) a VL comprising a vlCDR1, a vlCDR2, and a vlCDR3 having an amino acid sequence of a vlCDR1, a vlCDR2, and a vlCDR3, respectively, of a VL of any of the STEAP1 binding domains depicted in FIG. 22 or a variant thereof; or (i) a VH comprising a vhCDR1, a vhCDR2, and a vhCDR3 having an amino acid sequence of a vhCDR1, a vhCDR2, and a vhCDR3, respectively, of a VH depicted in FIG. 22 or FIG. 31 or a variant thereof; and (ii) a VL comprising a vlCDR1, a vlCDR2, and a vlCDR3 having an amino acid sequence of a vlCDR1, a vlCDR2, and a vlCDR3, respectively, of a VL depicted in FIG. 22 or FIG. 32 or a variant thereof.

[0434] In some embodiments of the 2+1 Fab2-Fc x scFv-Fc, the STEAP1 ABDs each include a VH and VL domain selected from the following: (i) a VH having an amino acid sequence of any of the VH of any of the STEAP1 binding domains depicted in FIG. 22 or a variant thereof; and (ii) a VL having an amino acid sequence of a VL of any of the STEAP1 binding domains depicted in FIG. 22 or a variant thereof; or (i) a VH having an amino acid sequence of a VH depicted in FIG. 22 or FIG. 31 or a variant thereof; and (ii) a VL having an amino acid sequence of a VL depicted in FIG. 22 or FIG. 32 or a variant thereof.

[0435] FIG. 9 shows some exemplary Fc domain sequences that are useful in 2+1 Fab2-Fc x scFv-Fc format antibodies. In addition, FIGS. 11 and 12 provide exemplary CH1-hinge domains, CH1 domains, and hinge domains that can be included in the first or second monomer of the 2+1 Fab2-Fc x scFv-Fc format. Further, FIG. 13 provides useful CL sequences that can be used with this format.

### 5. 1+1 CLC Format

[0436] One heterodimeric antibody format that finds particular use in subject anti-CD28 x anti-STEAP1 antibodies provided herein is the “1+1 Common Light Chain” or “1+1 CLC” format, which is depicted in FIG. 14C. The 1+1 CLC format antibody includes a first monomer that includes a VH1-CH1-hinge-CH2-CH3, wherein VH1 is a first variable heavy domain and CH2-CH3 is a first Fc domain; a second monomer that includes a VH2-CHT-hinge-CH2-CH3, wherein VH2 is a second variable heavy domain and CH2-C3 is a second Fc domain; and a third monomer “common light chain” comprising VL-CL, wherein VL is a common variable light domain and CL is a constant light domain. In such embodiments, the VL pairs with the VH1 to form a first binding domain with a first antigen binding specificity; and the VL pairs with the VH2 to form a second binding domain with a second antigen binding specificity. In some embodiments, the 1+1 CLC format antibody is a bivalent antibody.

[0437] In some embodiments, the first and second Fc domains of the 1+1 CLC format are variant Fc domains that include heterodimerization skew variants (e.g., a set of amino acid substitutions as shown in FIGS. 3 and 8). Particularly useful heterodimerization skew variants include S364K/E357Q: L368D/K370S; L368D/K370S: S364K; L368E/K370S: S364K; T411T/E360E/Q362E: D401K; L368D/K370S: S364K/E357L; K370S: S364K/E357Q; T366S/L368A/Y407V: T366W and T366S/L368A/Y407V/Y349C: T366W/S354C (EU numbering). In exemplary embodiments, one of the first or second variant Fc domains includes heterodimerization skew variants L368D/K370S and the other of the first or second variant Fc domains includes heterodimerization skew variants S364K/E357Q, wherein numbering is according to EU numbering. In exemplary embodiments, the first variant Fc domain includes heterodimerization skew variants L368D/K370S and the second variant Fc domain includes heterodimerization skew variants S364K/E357Q, wherein numbering is according to EU numbering.

[0438] In some embodiments, the variant Fc domains include ablation variants (including those shown in FIG. 5). In some embodiments, each of the first and second variant Fc domains include ablation variants E233P/L234V/L235A/G236del/S267K, wherein numbering is according to EU numbering.

[0439] In some embodiments, the constant domain (CH1-hinge-CH2-CH3) of the first or second monomer includes pI variants (including those shown in FIG. 4). In exemplary embodiments, the constant domain (CH1-hinge-CH2-CH3) of the first or second monomer includes pI variants N208D/Q295E/N384D/Q418E/N421D, wherein numbering is according to EU numbering.

[0440] In some embodiments, the 1+1 CLC format antibody provided herein includes FcRn variants M428L/N434S, wherein numbering is according to EU numbering.

[0441] In exemplary embodiments, the first variant Fc domain includes heterodimerization skew variants L368D/K370S and the second variant Fc domain includes heterodimerization skew variants S364K/E357Q; each of the first and second variant Fc domains include ablation variants E233P/L234V/L235A/G236del/S267K; and the constant domain (CH1-hinge-CH2-CH3) of the first monomer includes pI variants N208D/Q295E/N384D/Q418E/N421D, wherein numbering is according to EU numbering.

[0442] In some embodiments, the CH1-hinge-CH2-CH3 of the first monomer comprises amino acid variants L368D/K370S/N208D/Q295E/N384D/Q418E/N421D/E233P/L234V/L235A/G236del/S267 K, and the second Fc domain comprises amino acid variants S364K/E357Q/E233P/L234V/L235A/G236del/S267K, wherein numbering is according to EU numbering.

[0443] In some embodiments, the 1+1 CLC format antibody provided herein further includes FcRn variants M428L/N434S, wherein numbering is according to EU numbering.

[0444] In some embodiments, one of the first binding domain or the second binding domain binds CD28 and the other binding domain binds STEAP1 . Any suitable CD28 binding domain and STEAP1 domain can be included in subject 1+1 CLC format antibody, including any of the CD28 binding domains and STEAP1 binding domains provided herein or a variant thereof (see, e.g., FIGS. 15-18, 21, 22, 31, 32, and 82).

### 6. 2+1 CLC Format

[0445] Another heterodimeric antibody format that finds particular use in subject CD28 x anti-STEAP1 antibodies provided herein is the “2+1 Common Light Chain” or “2+1 CLC” format, which is depicted in FIG. 14D. The 2+1 CLC format includes a first monomer that includes a VH1-CH1-linker-VH1-CH1-hinge-CH2-CH3, wherein the VHls are each a first variable heavy domain and CH2-CH3 is a first Fc domain; a second monomer that includes a VH2-CH1-hinge-CH2-CH3, wherein VH2 is a second variable heavy domain and CH2-CH3 is a second Fc domain; and a third monomer that includes a “common light chain” VL-CL, wherein VL is a common variable light domain and CL is a constant light domain. The VL pairs with each of the VHls of the first monomer to form two first binding domains, each with a first antigen binding specificity; and the VL pairs with the VH2 to form a second binding domain with a second antigen binding specificity. The linker of the first monomer can be any suitable linker, including any one of the domain linkers or combinations thereof described in FIG. 7. In some embodiments, the 2+1 CLC format antibody is a trivalent antibody.

[0446] In some embodiments, the first and second Fe domains of the 2+1 CLC format are variant Fe domains that include heterodimerization skew variants (e.g., a set of amino acid substitutions as shown in FIGS. 3 and 8). Particularly useful heterodimerization skew variants include S364K/E357Q: L368D/K370S; L368D/K370S: S364K; L368E/K370S: S364K; T411T/E360E/Q362E: D401K; L368D/K370S: S364K/E357L; K370S: S364K/E357Q; T366S/L368A/Y407V: T366W and T366S/L368A/Y407V/Y349C: T366W/S354C (EU numbering). In exemplary embodiments, one of the first or second variant Fc domains includes heterodimerization skew variants L368D/K370S and the other of the first or second variant Fc domains includes heterodimerization skew variants S364K/E357Q, wherein numbering is according to EU numbering. In exemplary embodiments, the first variant Fc domain includes heterodimerization skew variants L368D/K370S and the second variant Fc domain includes heterodimerization skew variants S364K/E357Q, wherein numbering is according to EU numbering.

[0447] In some embodiments, the variant Fc domains include ablation variants (including those shown in FIG. 5). In some embodiments, each of the first and second variant Fc domains include ablation variants E233P/L234V/L235A/G236del/S267K, wherein numbering is according to EU numbering.

[0448] In some embodiments, the constant domain (CH1-hinge-CH2-CH3) of the first or second monomer includes pI variants (including those shown in FIG. 4). In exemplary embodiments, the constant domain (CH1-hinge-CH2-CH3) of the first or second monomer includes pI variants N208D/Q295E/N384D/Q418E/N421D, wherein numbering is according to EU numbering.

[0449] In some embodiments, the 2+1 CLC format antibody provided herein further includes FcRn variants M428L/N434S, wherein numbering is according to EU numbering.

[0450] In exemplary embodiments, the first variant Fc domain includes heterodimerization skew variants L368D/K370S and the second variant Fc domain includes heterodimerization skew variants S364K/E357Q; each of the first and second variant Fc domains include ablation variants E233P/L234V/L235A/G236del/S267K; and the constant domain (CHT-hinge-CH2-CH3) of the first monomer includes pI variants N208D/Q295E/N384D/Q418E/N421D, wherein numbering is according to EU numbering. In some embodiments, the 2+1 CLC format antibody provided herein further includes FcRn variants M428L/N434S, wherein numbering is according to EU numbering.

[0451] In some embodiments, the CH1-hinge-CH2-CH3 of the second monomer comprises amino acid variants L368D/K370S/N208D/Q295E/N384D/Q418E/N421D/E233P/L234V/L235A/G236del/S267 K, and the first Fc domain comprises amino acid variants S364K/E357Q/E233P/L234V/L235A/G236del/S267K, wherein numbering is according to EU numbering.

[0452] In some embodiments, each of the two first binding domains binds a tumor STEAP1 and the second binding domain binds CD28. Any suitable CD28 binding domain and STEAP1 domain can be included in the subject 2+1 CLC format antibody, including any of the CD28 binding domains and STEAP1 binding domains provided herein or a variant thereof (see, e.g., FIGS. 15-18, 21, 22, 31, 32, and 82). 7. Dual scFv formats

[0453] One heterodimeric antibody format that finds particular use in the subject bispecific anti-CD28 x anti-STEAP1 antibodies is the dual scFv format, as are known in the art and shown in FIG. 14G. In this embodiment, the heterodimeric bispecific antibody is made up of two scFv-Fc monomers (both in either (vh-scFv linker-vl-[optional domain linker]-CH2-CH3) format or (vl-scFv linker-vh-[optional domain linker]-CH2-CH3) format, or with one monomer in one orientation and the other in the other orientation.

[0454] In this case, all ABDs are in the scFv format. Any suitable STEAP1 binding domain and CD28 binding domain can be included in anti-CD28 x anti-STEAP1 antibody in the dual scFv format, including any of the STEAP1 binding domains and CD28 binding domains provided herein.

[0455] In addition, the Fc domains of the dual scFv format comprise skew variants (e.g. a set of amino acid substitutions as shown in FIGS. 3 and 8, with particularly useful skew variants being selected from the group consisting of S364K/E357Q: L368D/K370S; L368D/K370S: S364K; L368E/K370S: S364K; T411T/E360E/Q362E: D401K; L368D/K370S: S364K/E357L, K370S: S364K/E357Q, T366S/L368A/Y407V: T366W and T366S/L368A/Y407V/Y349C: T366W/S354C), optionally ablation variants (including those shown in FIG. 5), optionally charged scFv linkers (including those shown in FIG. 6) and the heavy chain comprises pI variants (including those shown in FIG. 4).

[0456] In some embodiments, the dual scFv format includes skew variants, pI variants, and ablation variants. Accordingly, some embodiments include formats that comprise: a) a first monomer that comprises the skew variants S364K/E357Q, the ablation variants E233P/L234V/L235A/G236del/S267K, and a scFv that binds a first antigen (VH1-scFv linker-VL1-[optional domain linker]-CH2-CH3 or VL1-scFv linker-VH1-[optional domain linker]-CH2-CH3) and b) a first monomer that comprises the skew variants L368D/K370S, the ablation variants E233P/L234V/L235A/G236del/S267K, and a scFv that binds a second antigen (VH1-scFv linker-VL1-[optional domain linker]-CH2-CH3 or VL1-scFv linker-VH1-[optional domain linker]-CH2-CH3). pI variants can be as outlined herein, but most common will be charged scFv linkers of opposite charge for each monomer. FcRn variants, particularly 428L/434S, can optionally be included.

[0457] Any suitable STEAP1 binding domain and CD28 binding domain can be included in the dual scFv format, including any of the STEAP1 binding domains and CD28 binding domains and related VHs and VLs provided herein or a variant thereof (see, e.g., FIGS. 15-18, 21, 22, 31, 32, and 82). 8. One-armed central-scFv

[0458] One heterodimeric antibody format that finds particular use in subject anti-CD28 x anti-STEAP1 antibodies provided herein is the one-armed central-scFv format shown in FIG. 14K. In this embodiment, one monomer comprises just an Fc domain, while the other monomer includes a Fab domain (a first antigen binding domain), a scFv domain (a second antigen binding domain) and an Fc domain, where the scFv domain is inserted between the Fab domain and the Fc domain.

[0459] In this embodiment, one monomer comprises a first heavy chain comprising a first variable heavy domain, a CH1 domain and Fc domain, with a scFv comprising a scFv variable light domain, an scFv linker and a scFv variable heavy domain. The scFv is covalently attached between the C-terminus of the CH1 domain of the heavy constant domain and the N-terminus of the first Fc domain using domain linkers, in either orientation, VH1-CH1-[optional domain linker]-VH2-scFv linker-VL2-[optional domain linker]-CH2-CH3 or VH1-CH1-[optional domain linker]-VL2-scFv linker-VH2-[optional domain linker]-CH2-CH3. The second monomer comprises an Fc domain (CH2-CH3). This embodiment further utilizes a light chain comprising a variable light domain and a constant light domain, that associates with the heavy chain to form a Fab. As for many of the embodiments herein, these constructs include skew variants, pI variants, ablation variants, additional Fc variants, etc. as desired and described herein.

[0460] Any suitable STEAP1 binding domain and CD28 binding domain can be included in the one-armed central-scFv format, including any of the STEAP1 binding domains and CD28 binding domains and related VHs and VLs provided herein or a variant thereof (see, e.g., FIGS. 15-18, 21, 22, 31, 32, and 82). 9. One-armed scFv-mAb format

[0461] One heterodimeric antibody format that finds particular use in subject anti-CD28 x anti-STEAP1 antibodies provided herein is the one-armed sc-Fv-mAb format shown in FIG. 14H. This format includes: 1) a first monomer that comprises an “empty” Fc domain; 2) a second monomer that includes a first variable heavy domain (VH), a scFv domain (a second antigen binding domain) and an Fc domain, where the scFv domain is attached to the N-terminus of the first variable heavy domain; and 3) a light chain that includes a first variable light domain and a constant light domain. The first variable heavy domain and the first variable light domain form a first antigen binding domain and the scFv is a second antigen binding domain. In this format, one of the first antigen binding domain and second binding domain binds CD28, and the other antigen binding domain binds STEAP1.

[0462] As for many of the embodiments herein, these constructs include skew variants, pI variants, ablation variants, additional Fc variants, etc. as desired and described herein.

[0463] Any suitable STEAP1 binding domain and CD28 binding domain can be included in the one-armed scFv-mAb format antibody, including any of the STEAP1 binding domains and CD28 binding domains and related VHs and VLs provided herein or a variant thereof (see, e.g., FIGS. 15-18, 21, 22, 31, 32, and 82). 10. scFv-mAb format

[0464] One heterodimeric antibody format that finds particular use in subject anti-CD28 x anti-STEAP1 antibodies provided herein is the mAb-scFv format shown in FIG. 141. In this embodiment, the format relies on the use of a N-terminal attachment of a scFv to one of the monomers, thus forming a third antigen binding domain, wherein the Fab portions of the two monomers each bind one target and the “extra” scFv domain binds a different target.

[0465] In this embodiment, the first monomer comprises a first heavy chain (comprising a variable heavy domain and a constant domain), with a N-terminally covalently attached scFv comprising a scFv variable light domain, an scFv linker and a scFv variable heavy domain in either orientation ((vhl-scFv linker-vll-[optional domain linker]- vh2-CH1-hinge-CH2-CH3) or (with the scFv in the opposite orientation) ((vll-scFv linker-vhl-[optional domain linker]-vh2-CHT-hinge-CH2-CH3)). The second monomer comprises a heavy chain VH2-CH1-hinge-CH2-CH3. This embodiment further utilizes a common light chain, comprising a variable light domain and a constant light domain, that associates with the heavy chains to form two identical Fabs. As for many of the embodiments herein, these constructs include skew variants, pI variants, ablation variants, additional Fc variants, etc. as desired and described herein.

[0466] Any suitable STEAP1 binding domain and CD28 binding domain can be included in the scFv-mAb antibody format, including any of the STEAP1 binding domains and CD28 binding domains and related VHs and VLs provided herein or a variant thereof (see, e.g., FIGS. 15-18, 21, 22, 31, 32, and 82). 11. mAb-Fv format

[0467] One heterodimeric antibody format that finds particular use in subject anti-CD28 x anti-STEAP1 antibodies provided herein is the mAb-Fv format (FIG. 14L). In this embodiment, the format relies on the use of a C-terminal attachment of an “extra” variable heavy domain to one monomer and the C-terminal attachment of an “extra” variable light domain to the other monomer, thus forming a third antigen binding domain (i.e. an “extra” Fv domain), wherein the Fab portions of the two monomers bind CD28 and the “extra” Fv domain binds STEAP1.

[0468] In this embodiment, the first monomer comprises a first heavy chain, comprising a first variable heavy domain and a first constant heavy domain comprising a first Fc domain, with a first variable light domain covalently attached to the C-terminus of the first Fc domain using a domain linker (vhl-CHT-hinge-CH2-CH3-[optional linker]-vl2). The second monomer comprises a second variable heavy domain, a second constant heavy domain comprising a second Fc domain, and a third variable heavy domain covalently attached to the C-terminus of the second Fc domain using a domain linker (vhl-CHT-hinge-CH2-CH3-[optional linker]-vh2). This embodiment further utilizes a common light chain comprising a variable light domain and a constant light domain, which associates with the heavy chains to form two identical Fabs that include two identical Fvs. The two C-terminally attached variable domains make up the “extra” third Fv. As for many of the embodiments herein, these constructs include skew variants, pI variants, ablation variants, additional Fc variants, etc. as desired and described herein.

[0469] Any suitable STEAP1 binding domain and CD28 binding domain can be included in the mAb-Fv format, including any of the STEAP1 binding domains and CD28 binding domains and related VHs and VLs provided herein or a variant thereof (see, e.g., FIGS. 15-18, 21, 22, 31, 32, and 82). 12. Central-Fv format

[0470] One heterodimeric antibody format that finds particular use in subject anti-CD28 x anti-STEAP1 antibodies provided herein is the central-Fv format shown in FIG. 14M. In this embodiment, the format relies on the use of an inserted Fv domain thus forming an “extra” third antigen binding domain, wherein the Fab portions of the two monomers bind STEAP1 and the “extra” central-Fv domain binds CD28. The Fv domain is inserted between the Fc domain and the CH1-Fv region of the monomers, thus providing a third antigen binding domain, wherein each monomer contains a component of the Fv (e.g. one monomer comprises a variable heavy domain and the other a variable light domain of the “extra” central Fv domain).

[0471] In this embodiment, one monomer comprises a first heavy chain comprising a first variable heavy domain, a CH1 domain, and Fc domain and an additional variable light domain. The additional variable light domain is covalently attached between the C-terminus of the CH1 domain of the heavy constant domain and the N-terminus of the first Fc domain using domain linkers (vhl-CH1-[optional linker]-vl2-hinge-CH2-CH3). The other monomer comprises a first heavy chain comprising a first variable heavy domain, a CH1 domain and Fc domain and an additional variable heavy domain (vhl-CH1-[optional linker]-vh2-hinge-CH2-CH3). The additional variable heavy domain is covalently attached between the C-terminus of the CH1 domain of the heavy constant domain and the N-terminus of the first Fc domain using domain linkers. This embodiment utilizes a common light chain, comprising a variable light domain and a constant light domain, that associates with the heavy chains to form two identical Fabs that each bind STEAP1 . The additional variable heavy domain and additional variable light domain form an “extra” central Fv that binds CD28. As for many of the embodiments herein, these constructs include skew variants, pI variants, ablation variants, additional Fc variants, etc. as desired and described herein.

[0472] Any suitable STEAP1 binding domain and CD28 binding domain can be included in the central-Fv format, including any of the STEAP1 binding domains and CD28 binding domains and related VHs and VLs provided herein or a variant thereof (see, e.g., FIGS. 15-18, 21, 22, 31, 32, and 82). 13. Non-heterodimeric bispecific antibodies

[0473] As will be appreciated by those in the art, the anti-CD28 x anti-STEAP1 antibodies provided herein can also be included in non-heterodimeric bispecific formats (see FIG. 14J). In this format, the anti-CD28 x anti-STEAP1 includes: 1) a first monomer comprising a VH1-CHT-hinge-CH2-CH3; 2) a second monomer comprising a VH2-CH1-hinge-CH2-CH3; 3) a first light chain comprising a VL1-CL; and 4) a second light chain comprising a VL2-CL. In such embodiments, the VH1 and VL1 form a first antigen binding domain and VH2 and VL2 form a second antigen binding domain. One of the first or second antigen binding domains binds CD28 and the other antigen binding domain binds STEAP1.

[0474] Any suitable STEAP1 binding domain and CD28 binding domain can be included in anti-CD28 x anti-STEAP1 antibody in the non-heterodimeric bispecific antibody format, including any of the STEAP1 binding domains and CD28 binding domains and related VHs and VLs provided herein or a variant thereof (see, e.g., FIGS. 15-18, 21, 22, 31, 32, and 82). 14. Trident Format

[0475] In some embodiments, the anti-CD28 x anti-STEAP1 antibodies provided herein are in the “Trident” format as generally described in WO2015/184203, hereby expressly incorporated by reference in its entirety and in particular for the Figures, Legends, definitions and sequences of “Heterodimer-Promoting Domains” or “HPDs”, including “K-coil” and “E-coil” sequences. Tridents rely on using two different HPDs that associate to form a heterodimeric structure as a component of the structure, see FIG. 14N. In this embodiment, the Trident format include a “traditional” heavy and light chain (e.g. VH1-CH1-hinge-CH2-CH3 and VL1-CL), a third chain comprising a first “diabody-type binding domain” or “DART®”, VH2-(linker)-VL3-HPD1 and a fourth chain comprising a second DART®, VH3-(linker)-(linker)-VL2-HPD2. The VH1 and VL1 form a first ABD, the VH2 and VL2 form a second ABD, and the VH3 and VL3 form a third ABD. In some cases, as is shown in FIG. 14N, the second and third ABDs bind the same antigen.

[0476] Any suitable STEAP1 binding domain and CD28 binding domain can be included in the trident format, including any of the STEAP1 binding domains and CD28 binding domains and related VHs and VLs provided herein or a variant thereof (see, e.g., FIGS. 15-18, 21, 22, 31, 32, and 82).

[0477] V. Anti-CD28 x Anti-CEACAM5 Antibodies

[0478] In one aspect, provided herein are novel anti-CD28 x anti-CEACAM5 antibodies In some embodiments, the anti-CD28 x anti-CEACAM5 antibodies described herein are capable of agonistically binding to CD28 costimulatory molecules on T cells and CEACAM5 on tumor cells. Such antibodies selectively enhance anti-tumor activity at CEACAM5-associated tumor sites while minimizing peripheral toxicity. The subject antibodies provided herein are particularly useful in combination with other anti-cancer therapies, including, for example, bispecific antibodies for the treatment of CEACAM5-associated cancers.

[0479] The anti-CD28 x anti-CEACAM5 antibodies are multivalent and include at least two antigen binding domains (ABDs), wherein at least one antigen binding domain is a CD28 binding domain and at least one antigen binding domain is a CEACAM5 binding domain. Any suitable CD28 binding domain and CEACAM5 binding domain can be included in the subject anti-CD28 x anti-CEACAM5 antibodies, including, for example, the CD28 binding domains and CEACAM5 binding domains provided herein.

[0480] The antigen binding domains provided herein generally include a variable heavy domain (VH) having a VH-CDR1, VH-CDR-2, and VH-CDR-3; and a variable light domain (VL), and a variable light domain (VL) having a VL-CDR1, VL-CDR-2, and VL-CDR-3.

[0481] In addition, as discussed above, the numbering used in the sequence listing and figures for the identification of the CDRs is Kabat, however, different numbering can be used, which will change the amino acid sequences of the CDRs as shown in Table 2.

[0482] For all of the variable heavy and light domains listed herein, further variants can be made. As outlined herein, in some embodiments the set of 6 CDRs can have from 0, 1, 2, 3, 4 or 5 amino acid modifications (with amino acid substitutions finding particular use), as well as changes in the framework regions of the variable heavy and light domains, as long as the frameworks (excluding the CDRs) retain at least about 80, 85, 90, 95 or 99% identity to a human germline sequence selected from those listed in FIG. 1 of U.S. Pat. No. 7,657,380, which Figure and Legend is incorporated by reference in its entirety herein. Thus, for example, the identical CDRs as described herein can be combined with different framework sequences from human germline sequences, as long as the framework regions retain at least 80, 85 or 90% identity to a human germline sequence selected from those listed in FIG. 1 of U.S. Pat. No. 7,657,380. Alternatively, the CDRs can have amino acid modifications (e.g., from 1, 2, 3, 4 or 5 amino acid modifications in the set of CDRs (that is, the CDRs can be modified as long as the total number of changes in the set of 6 CDRs is less than 6 amino acid modifications, with any combination of CDRs being changed; e.g., there may be one change in vlCDR1, two in vhCDR2, none in vhCDR3, etc.)), as well as having framework region changes, as long as the framework regions retain at least 80, 85, 95 to 99% identity to a human germline sequence selected from those listed in FIG. 1 of U.S. Pat. No. 7,657,380.

[0483] As will be appreciated by those in the art, any set of 6 CDRs or VH and VL domains can be in the scFv format or in the Fab format, which is then added to the heavy and light constant domains, where the heavy constant domains comprise variants (including within the CH1 domain as well as the Fc domain).

[0484] In addition, in embodiments wherein the subject antibody includes an scFv, the scFv can be in an orientation from N- to C-terminus ofVH-scFv linker-VL or VL-scFv linker-VH. In some formats, one or more of the ABDs generally is a Fab that includes a VH domain on one protein chain (generally as a component of a heavy chain) and a VL on another protein chain (generally as a component of a light chain). Exemplary scFv linkers for use in the subject antibodies are depicted in FIG. 6.

[0485] In some embodiments, the anti-CD28 x anti-CEACAM5 antibody is a bispecific antibody. In some embodiments, the anti-CD28 x anti-CEACAM5 antibody is a bivalent antibody. In some embodiments, the anti-CD28 x anti-CEACAM5 antibody is a trivalent antibody. In some embodiments, the anti-CD28 x anti-CEACAM5 antibody is a bispecific, bivalent antibody. In some embodiments, the anti-CD28 x anti-CEACAM5 antibodies include one CD28 binding domain and one CEACAM5 binding domain. In exemplary embodiments, the anti-CD28 x anti-CEACAM5 antibody is a bispecific, trivalent antibody. In some embodiments, the anti-CD28 x anti-CEACAM5 antibodies include one CD28 binding domain and two CEACAM5 binding domains.

[0486] The anti-CD28 x anti-CEACAM5 antibodies provided herein can be in any useful format, including, including, for example, canonical immunoglobulin, as well as the “1 +1 Fab-scFv-Fc,” “2+1 “mAb-scFv,” “2+1 Fab2-scFv-Fc,” and “2+1 Fab2-Fc x scFv-Fc” formats described herein (FIG. 14). Additional useful formats include, but are not limited to: “mAb-Fv,” “central-Fv,” “one-armed scFv-mAb,” “scFv-mAb,” “dual scFv,” and “trident” formats provided herein (see, e.g., FIG. 14). See also, US20180127501A1, which is incorporated by reference herein, particularly in pertinent part relating to antibody formats (see, e.g., FIG. 2). In some embodiments, the anti-CD28 x anti-CEACAM5 antibodies are heterodimeric bispecific antibodies that include variant Fc domains having any of the heterodimerization skew variants, pI variants and/or ablation variants described herein. See, e.g. FIG. 8.

[0487] Note that unless specified herein, the order of the antigen list in the name does not confer structure; that is an anti-CEACAM5 x anti-CD28 1+1 Fab-scFv-Fc antibody can have the scFv bind to CEACAM5 or CD28, although in some cases, the order specifies structure as indicated.

[0488] The anti-CD28 x anti-CEACAM5 antibodies provided herein further include different antibody domains. As described herein and known in the art, the antibodies described herein include different domains within the heavy and light chains, which can be overlapping as well. These domains include, but are not limited to, the Fc domain, the CH1 domain, the CH2 domain, the CH3 domain, the hinge domain, the heavy constant domain (CHT-hinge-Fc domain or CHT-hinge-CH2-CH3), the variable heavy domain, the variable light domain, the light constant domain, Fab domains and scFv domains.

[0489] As shown herein, there are a number of suitable linkers (for use as either domain linkers or scFv linkers) that can be used to covalently attach the recited domains (e.g., scFvs, Fabs, Fc domains, VH domains, VL domains, etc.), including traditional peptide bonds, generated by recombinant techniques. Exemplary linkers to attach domains of the subject antibody to each other are depicted in FIG. 7. In some embodiments, the linker peptide may predominantly include the following amino acid residues: Gly, Ser, Ala, or Thr.

[0490] The linker peptide should have a length that is adequate to link two molecules in such a way that they assume the correct conformation relative to one another so that they retain the desired activity. In one embodiment, the linker is from about 1 to 50 amino acids in length, preferably about 1 to 30 amino acids in length. In one embodiment, linkers of 1 to 20 amino acids in length may be used, with from about 5 to about 10 amino acids finding use in some embodiments. Useful linkers include glycine-serine polymers, including for example (GS)n, (GSGGS)n (SEQ ID NO: 2684), (GGGGS)n (SEQ ID NO: 36), and (GGGS)n (SEQ ID NO: 2685), where n is an integer of at least one (and generally from 3 to 4), glycine-alanine polymers, alanine-serine polymers, and other flexible linkers. Alternatively, a variety of nonproteinaceous polymers, including but not limited to polyethylene glycol (PEG), polypropylene glycol, polyoxyalkylenes, or copolymers of polyethylene glycol and polypropylene glycol, may find use as linkers.

[0491] Other linker sequences may include any sequence of any length of CL/CH1 domain but not all residues of CL/CH1 domain; for example, the first 5-12 amino acid residues of the CL/CH1 domains. Linkers can be derived from immunoglobulin light chain, for example Cκ or Cλ. Linkers can be derived from immunoglobulin heavy chains of any isotype, including for example Cγ1, Cγ2, Cγ3, Cγ4, Cα1, Cα2, Cδ, Cε, and Cμ. Linker sequences may also be derived from other proteins such as Ig-like proteins (e.g., TCR, FcR, KIR), hinge region-derived sequences, and other natural sequences from other proteins.

[0492] In some embodiments, the linker is a “domain linker,” used to link any two domains as outlined herein together. For example, in the 2+1 Fab2-scFv-Fc format, there may be a domain linker that attaches the C-terminus of the CH1 domain of the Fab to the N-terminus of the scFv, with another optional domain linker attaching the C-terminus of the scFv to the CH2 domain (although in many embodiments the hinge is used as this domain linker). While any suitable linker can be used, many embodiments utilize a glycine-serine polymer as the domain linker, including for example (GS)n, (GSGGS)n (SEQ ID NO: 2684), (GGGGS)n (SEQ ID NO: 36), and (GGGS)n (SEQ ID NO: 2685), where n is an integer of at least one (and generally from 3 to 4 to 5) as well as any peptide sequence that allows for recombinant attachment of the two domains with sufficient length and flexibility to allow each domain to retain its biological function. In some cases, and with attention being paid to “strandedness,” as outlined below, charged domain linkers, as used in some embodiments of scFv linkers can be used. Exemplary useful domain linkers are depicted in FIG. 7.

[0493] In some embodiments, the linker is a scFv linker that is used to covalently attach the VH and VL domains as discussed herein. In many cases, the scFv linker is a charged scFv linker, a number of which are shown in FIG. 6. Accordingly, provided herein are charged scFv linkers, to facilitate the separation in pI between a first and a second monomer. That is, by incorporating a charged scFv linker, either positive or negative (or both, in the case of scaffolds that use scFvs on different monomers), this allows the monomer comprising the charged linker to alter the pI without making further changes in the Fc domains. These charged linkers can be substituted into any scFv containing standard linkers.

[0494] Again, as will be appreciated by those in the art, charged scFv linkers are used on the correct “strand” or monomer, according to the desired changes in pI. For example, as discussed herein, to make 1+1 Fab-scFv-Fc format heterodimeric antibody, the original pI of the Fv region for each of the desired antigen binding domains are calculated, and one is chosen to make an scFv, and depending on the pI, either positive or negative linkers are chosen.

[0495] Charged domain linkers can also be used to increase the pI separation of the monomers of the invention as well, and thus those included in FIG. 7 can be used in any embodiment herein where a linker is utilized.

[0496] Exemplary subject anti-CD28 x anti-CEACAM5 antibodies are depicted, for example, in FIG. 24. During the cell culture production of the anti-CD28 x anti-CEACAM5 antibodies provided herein, the C-terminal lysine residue or C-terminal lysine and glycine residues may be cleaved from the heavy chain monomers, thereby leading to variants with C-terminal “clipping.” See, e.g., Jiang et al., Journal of Pharmaceutical Sciences 105:2066-2072 (2016). Thus, in some embodiments provided herein, the anti-CD28 x anti-CEACAM5 antibody is a variant of one of the anti-CD28 x anti-CEACAM5 antibodies includes a deletion of a C-terminal lysine (-K) terminal or C-terminal lysine and glycine (-GK) residues in one or both Fe domains of an anti-CD28 x anti-CEACAM5 antibody described herein. In some embodiments, the deletion is G446del and/or K447del (EU numbering).

[0497] Aspects of the anti-CD28 x anti-CEACAM5 antibodies are further described in detail below.

### A. CD28 Binding Domains

[0498] In one aspect, provided herein are CD28 antigen binding domain (ABD) compositions. In embodiments, the CD28 ABDs include set of 6 CDRs as depicted in the sequence listing and FIG. 65 either as the CDRs are underlined or, in the case where a different numbering scheme is used as described herein and as shown in Table 2, as the CDRs that are identified using other alignments within the variable heavy (VH) domain and variable light domain (VL) sequences of those depicted in FIG. 65 and the sequence listing (see Table 2). Suitable CD28 ABDs can also include the entire VH and VL sequences as depicted in these sequences and figures, used as scFvs or as Fab domains. In embodiments, the CD28 ABD includes a variable heavy (VH) domain or variant thereof and/or variable light (VL) domain or variant thereof of any of the CD28 binding domains disclosed herein (e.g., FIG. 65). Such CD28 binding domains are useful, for example, for inclusion in the anti-CD28 x anti- CEACAM5 antibodies provided herein.

[0499] In exemplary embodiments, the CD28 ABD includes the variable heavy (VH) domain and variable light (VL) domain of any one of the CD28 ABDs described herein, including the figures and sequence listing. In exemplary embodiments, the CD28 ABD is a CD28 ABD depicted in FIG. 65. In exemplary embodiments, the CD28 ABD comprises a VH and VL pair selected from those depicted in FIG. 65.

[0500] In addition to the parental CD28 variable heavy and variable light domains disclosed herein, provided herein are CD28 ABDs that include a variable heavy domain and/or a variable light domain that are variants of a CD28 ABD VH and VL domain disclosed herein. In one embodiment, the variant VH domain and/or VL domain has from 1, 2, 3, 4, 5, 6, 7, 8, 9 or 10 amino acid changes from a VH and/or VL domain of a CD28 ABD described herein, including the figures and sequence listing. In exemplary embodiments, the variant VH domain and/or VL domain has from 1, 2, 3, 4, 5, 6, 7, 8, 9 or 10 amino acid changes from a VH and/or VL domain of a CD28 ABD depicted in FIG. 65. In some embodiments, the changes are in a VH domain depicted in FIG. 65. In some embodiments, the changes are in a VL domain are depicted in FIG. 65. In some embodiments, the changes are in a VH and VL domain are depicted in FIG. 65. In some embodiments, the one or more amino acid changes are in the VH and/or VL framework regions (FR1, FR2, FR3, and/or FR4). In some embodiments, the one or more amino acid change(s) are in one or more of vhCDR1-3 and/or vlCDR1-3. In some embodiments, the CD28 variant includes the vhCDR1-3 and/or vlCDR1-3 of any of the CD28 ABDs in FIG. 65. In certain embodiments, the CD28 ABD is capable of binding to CD28, as measured at least one of a Biacore, surface plasmon resonance (SPR), flow cytometry, and/or BLI (biolayer interferometry, e.g., Octet assay) assay, with the latter finding particular use in many embodiments. In particular embodiments, the CD28 ABD is capable of binding human CD28 antigen (FIG. 2).

[0501] In one embodiment, the variant VH and/or VL domain is at least 90, 95, 97, 98 or 99% identical to the VH and/or VL of a CD28 ABD as described herein, including the figures and sequence listing. In exemplary embodiments, the variant VH and/or VL domain is at least 90, 95, 97, 98 or 99% identical to the VH and/or VL of a CD28 ABD depicted in FIG. 65. In some embodiments, the CD28 ABD includes a VH that is at least 90, 95, 97, 98 or 99% identical to VH domain depicted in FIG. 65. In some embodiments, the CD28 ABD includes a VL that is at least 90, 95, 97, 98 or 99% identical to VL domain depicted in FIG. 65. In some embodiments, the CD28 ABD includes a VH and a VL that is at least 90, 95, 97, 98 or 99% identical to a VH domain and a VL domain depicted in FIG. 65. In some embodiments, the CD28 ABD includes the 6 CDRs (vhCDR1-3 and vlCDR1-3) of any of the CD28 ABDs of FIG. 65. In certain embodiments, the CD28 is capable of binding to the CD28, as measured by at least one of a Biacore, surface plasmon resonance (SPR), flow cytometry, and/or BLI (biolayer interferometry, e.g., Octet assay) assay, with the latter finding particular use in many embodiments. In particular embodiments, the CD28 ABD is capable of binding human CD28 antigen (FIG. 2).

[0502] The anti-CD28 x anti-CEACAM5 antibodies provided herein include at least one CD28 binding domain. Any suitable CD28 binding domain can be included in the anti-CD28 x anti-CEACAM5 antibodies provided herein. In exemplary embodiments, the CD28 binding domain is an agonistic CD28 ABDs that advantageously provide T cell costimulatory activity.

[0503] As will be appreciated by those in the art, suitable CD28 binding domains can comprise a set of 6 CDRs as depicted in the figures, either as they are underlined or, in the case where a different numbering scheme is used, as described herein and as shown in Table 2, as the CDRs that are identified using other alignments within the variable heavy (VH) domain and variable light domain (VL) sequences of those CD28 binding domains depicted in FIGS. 15, 18, 21 and 65. Additional VH and VL sequences of exemplary CD28 binding domains that can be used in the subject antibodies are depicted in FIGS. 16 and 17. Suitable CD28 ABDs can also include the entire VH and VL sequences as depicted in these sequences and figures, used as scFvs or as Fabs.

[0504] In one embodiment, the CD28 antigen binding domain includes the 6 CDRs (i.e., vhCDR1-3 and vlCDR1-3) of any of the CD28 binding domains described herein, including, but not limited to those depicted in FIGS. 15, 18, 21 and 65. In some embodiments, the CD28 ABD that binds human CD28 is one of the following CD28 ABDs: 1A7[CD28]_H1L1, 1A7[CD28]_H1.1_L1, IA7[CD28]_H1_L1.71, IA7[CD28]_H1.1_L1.71, IA7[CD28]H1.14_L1, IA7[CD28]_H1.14_L1.71, CD28.3[CD28]_H0L0, hCD28.3[CD28]_H1L1, 5.11A1[CD28]_H0L0, TGN1412_H1L1, 341VL34[CD28]H1L1, 341VL36[CD28]_H1L1, 281VL4[CD28]_H1L1, HuTN228[CD28]_H1L1, PV1[CD28]H0L0, m9.3[CD28]_H0L0, hu9.3[CD28]_H1L1, 9G2[CD28]_H0L0, 9G2[CD28]_H1L1, 2F10A3.140[CD28]_H1L1, TN228[CD28]_H4L2, IA7[CD28]_H1.1_L1 [S-S], IA7[CD28]_H1_L1.71 [S-S], IA7[CD28]_H1.1_L1.71 [S-S], IA7[CD28]_H1.14_L1 [S-S], IA7[CD28]_H1.14_L1.71 [S-S], IA7[CD28]_H1.129_L1.71 [S-S], 1A7[CD28]_H1.106_L1.71 [S-S], 1A7[CD28]_H1.129_L1 [S-S], and IA7[CD28]_H1.106_L1 [S-S](FIGS. 15, 18, 21 and 65). In some embodiments, the CD28 ABD includes a VH/VL pair selected from the VHs and VLs depicted in FIGS. 15, 16, 17, and 82.

[0505] In addition to the parental CDR sets disclosed in the figures and sequence listing that form an ABD to CD28, provided herein are variant CD28 ABDS having CDRs that include at least one modification of the CD28 ABD CDRs disclosed herein (e.g., (FIGS. 15, 18, 21 and 65, and the sequence listing). In one embodiment, the CD28 ABD of the subject anti-CD28 x anti-CEACAM5 antibody includes a set of 6 CDRs with 1, 2, 3, 4, 5, 6, 7, 8, 9, 10 amino acid modifications as compared to the 6 CDRs of a CD28 ABD as described herein, including the figures and sequence listing. In exemplary embodiments, the CD28 ABD of the subject anti-CD28 x anti-CEACAM5 antibody includes a set of 6 CDRs with 1, 2, 3, 4, 5, 6, 7, 8, 9, 10 amino acid modifications as compared to the 6 CDRs of one of the following CD28 ABDs: IA7[CD28]_H1L1, IA7[CD28]_H1.1_L1, IA7[CD28]_H1_L1.71, IA7[CD28]_H1.1_L1.71, 1A7[CD28]H1.14_L1, 1A7[CD28]_H1.14_L1.71, CD28.3[CD28]_H0L0, hCD28.3[CD28]_H1L1, 5.11A1[CD28]_H0L0, TGN1412_H1L1, 341VL34[CD28]H1L1, 341VL36[CD28]_H1L1, 281VL4[CD28]_H1L1, HuTN228[CD28]_H1L1, PV1[CD28]H0L0, m9.3[CD28]_H0L0, hu9.3[CD28]_H1L1, 9G2[CD28]_H0L0, 9G2[CD28]_H1L1, 2F10A3.140[CD28]_H1L1, TN228[CD28]_H4L2, IA7[CD28]_H1.1_L1 [S-S], IA7[CD28]_H1_L1.71 [S-S], IA7[CD28]_H1.1_L1.71 [S-S], IA7[CD28]_H1.14_L1 [S-S], IA7[CD28]_H1.14_L1.71 [S-S], IA7[CD28]_H1.129_L1.71 [S-S], 1A7[CD28]_H1.106_L1.71 [S-S], 1A7[CD28]_H1.129_L1 [S-S], and IA7[CD28]_H1.106_L1 [S-S](FIGS. 15, 18, 21 and 65). In certain embodiments, the CD28 ABD of the subject anti-CD28 x anti-CEACAM5 antibody is capable of binding CD28 antigen, as measured by at least one of a Biacore, surface plasmon resonance (SPR), flow cytometry, and/or BLI (biolayer interferometry, e.g., Octet assay) assay, with the latter finding particular use in many embodiments. In particular embodiments, the CD28 ABD is capable of binding human CD28 antigen (see FIG. 1).

[0506] In some embodiments, the CD28 ABD of the subject anti-CD28 x anti-CEACAM5 antibody includes 6 CDRs that are at least 90, 95, 97, 98 or 99% identical to the 6 CDRs of a CD28 ABD as described herein, including the figures and sequence listing. In exemplary embodiments, the CD28 ABD of the subject anti-CD28 x anti-CEACAM5 antibody includes 6 CDRs that are at least 90, 95, 97, 98 or 99% identical to the 6 CDRs of one of the following CD28 ABDs: IA7[CD28]H1L1, IA7[CD28]_H1.1_L1, IA7[CD28]_H1_L1.71, IA7[CD28]_H1.1_L1.71, IA7[CD28]_H1.14_L1, IA7[CD28]_H1.14_L1.71, CD28.3[CD28]_H0L0, hCD28.3[CD28]_H1L1, 5.11A1[CD28]_H0L0, TGN1412_H1L1, 341VL34[CD28]_H1L1, 341VL36[CD28]_H1L1, 281VL4[CD28]_H1L1, HuTN228[CD28]H1L1, PV1[CD28]H0L0, m9.3[CD28]_H0L0, hu9.3[CD28]_H1L1, 9G2[CD28]_H0L0, 9G2[CD28]_H1L1, 2F10A3.140[CD28]_H1L1, TN228[CD28]_H4L2, IA7[CD28]_H1.1_L1 [S-S], IA7[CD28]_H1_L1.71 [S-S], IA7[CD28]_H1.1_L1.71 [S-S], IA7[CD28]_H1.14_L1 [S-S], IA7[CD28]_H1.14_L1.71 [S-S], 1A7[CD28]_H1.129_L1.71 [S-S], 1A7[CD28]_H1.106_L1.71 [S-S], 1A7[CD28]_H1.129_L1 [S-S], and 1A7[CD28]_H1.106_L1 [S-S](FIGS. 15, 18, 21 and 65). In certain embodiments, the CD28 ABD is capable of binding to the CD28, as measured by at least one of a Biacore, surface plasmon resonance (SPR), flow cytometry, and/or BLI (biolayer interferometry, e.g., Octet assay) assay, with the latter finding particular use in many embodiments. In particular embodiments, the CD28 ABD is capable of binding human CD28 antigen (see FIG. 1).

[0507] In another exemplary embodiment, the CD28 ABD of the subject anti-CD28 x anti-CEACAM5 antibody includes the variable heavy (VH) domain and variable light (VL) domain of any one of the CD28 ABDs described herein, including the figures and sequence listing. In exemplary embodiments, the CD28 ABD is one of the following CD28 ABDs: IA7[CD28]_H1L1, IA7[CD28]_H1.1_L1, IA7[CD28]_H1_L1.71, IA7[CD28]_H1.1_L1.71, IA7[CD28]H1.14_L1, IA7[CD28]_H1.14_L1.71, CD28.3[CD28]_H0L0, hCD28.3[CD28]_H1L1, 5.11A1[CD28]_H0L0, TGN1412_H1L1, 341VL34[CD28]_H1L1, 341VL36[CD28]_H1L1, 281VL4[CD28]_H1L1, HuTN228[CD28]_H1L1, PV1[CD28]H0L0, m9.3[CD28]_H0L0, hu9.3[CD28]_H1L1, 9G2[CD28]_H0L0, 9G2[CD28]_H1L1, 2F10A3.140[CD28]_H1L1, TN228[CD28]_H4L2, IA7[CD28]_H1.1_L1 [S-S], IA7[CD28]_H1_L1.71 [S-S], IA7[CD28]_H1.1_L1.71 [S-S], IA7[CD28]_H1.14_L1 [S-S], IA7[CD28]_H1.14_L1.71 [S-S], IA7[CD28]_H1.129_L1.71 [S-S], 1A7[CD28]_H1.106_L1.71 [S-S], 1A7[CD28]_H1.129_L1 [S-S], and IA7[CD28]_H1.106_L1 [S-S](FIGS. 15, 18, 21 and 65). In some embodiments, the CD28 ABD includes a VH and VL pair selected from the VH and VLs depicted in FIGS. 15, 16, 17, and 82.

[0508] In some embodiments, the anti-CD28 x anti-CEACAM5 antibody includes a CD28 ABD that includes a variable heavy domain and/or a variable light domain that are variants of a CD28 ABD VH and VL domain disclosed herein. In one embodiment, the variant VH domain and/or VL domain has from 1, 2, 3, 4, 5, 6, 7, 8, 9 or 10 amino acid changes from a VH and/or VL domain of a CD28 ABD described herein, including the figures and sequence listing. In exemplary embodiments, the variant VH domain and/or VL domain has from 1, 2, 3, 4, 5, 6, 7, 8, 9 or 10 amino acid changes from a VH and/or VL domain of one of the following CD28 ABDs: IA7[CD28]_H1L1, IA7[CD28]_H1.1_L1, IA7[CD28]_H1_L1.71, IA7[CD28]_H1.1_L1.71, IA7[CD28]_H1.14_L1, IA7[CD28]_H1.14_L1.71, CD28.3[CD28]_H0L0, hCD28.3[CD28]_H1L1, 5.11A1[CD28]_H0L0, TGN1412_H1L1, 341VL34[CD28]_H1L1, 341VL36[CD28]_H1L1, 281VL4[CD28]_H1L1, HuTN228[CD28]H1L1, PV1[CD28]H0L0, m9.3[CD28]_H0L0, hu9.3[CD28]_H1L1, 9G2[CD28]_H0L0, 9G2[CD28]_H1L1, 2F10A3.140[CD28]_H1L1,TN228[CD28]_H4L2, IA7[CD28]H1.1_L1 [S-S], IA7[CD28]_H1_L1.71 [S-S], IA7[CD28]_H1.1_L1.71 [S-S], IA7[CD28]_H1.14_L1 [S-S], IA7[CD28]_H1.14_L1.71 [S-S], IA7[CD28]_H1.129_L1.71 [S-S], 1A7[CD28]_H1.106_L1.71 [S-S], 1A7[CD28]_H1.129_L1 [S-S], and IA7[CD28]_H1.106_L1 [S-S](FIGS. 15, 18, 21 and 65). In some embodiments, the changes are in a VH domain depicted in FIGS. 15-18, 21 and 65. In some embodiments, the changes are in a VL domain are depicted in FIGS. 15-18, 21 and 65. In some embodiments, the changes are in a VH and VL domain are depicted in FIGS. 15-18, 21 and 65. In some embodiments, the one or more amino acid changes are in the VH and/or VL framework regions (FR1, FR2, FR3, and/or FR4). In some embodiments, the one or more amino acid change(s) are in one or more CDRs. In certain embodiments, the CD28 ABD is capable of binding to CD28, as measured by at least one of a Biacore, surface plasmon resonance (SPR), flow cytometry, and/or BLI (biolayer interferometry, e.g., Octet assay) assay, with the latter finding particular use in many embodiments. In particular embodiments, the CD28 ABD is capable of binding human CD28 antigen (see FIG. 1).

[0509] In one embodiment, the variant VH and/or VL domain is at least 90, 95, 97, 98 or 99% identical to the VH and/or VL of a CD28 ABD as described herein, including the figures and sequence listing. In exemplary embodiments, the variant VH and/or VL domain is at least 90, 95, 97, 98 or 99% identical to the VH and/or VL of one of the following CD28 ABDs: 1A7[CD28]_H1L1, 1A7[CD28]H1.1_L1, 1A7[CD28]_H1_L1.71, 1A7[CD28]_H1.1_L1.71, 1A7[CD28]H1.14_L1, 1A7[CD28]_H1.14_L1.71, CD28.3[CD28]_H0L0, hCD28.3[CD28]_H1L1, 5.11A1[CD28]_H0L0, TGN1412_H1L1, 341VL34[CD28]H1L1, 341VL36[CD28]_H1L1, 281VL4[CD28]_H1L1, HuTN228[CD28]_H1L1, PV1[CD28]H0L0, m9.3[CD28]_H0L0, hu9.3[CD28]_H1L1, 9G2[CD28]_H0L0, 9G2[CD28]_H1L1, 2F10A3.140[CD28]_H1L1, TN228[CD28]_H4L2, IA7[CD28]_H1.1_L1 [S-S], IA7[CD28]_H1_L1.71 [S-S], IA7[CD28]_H1.1_L1.71 [S-S], IA7[CD28]_H1.14_L1 [S-S], IA7[CD28]_H1.14_L1.71 [S-S], IA7[CD28]_H1.129_L1.71 [S-S], 1A7[CD28]_H1.106_L1.71 [S-S], 1A7[CD28]_H1.129_L1 [S-S], and IA7[CD28]_H1.106_L1 [S-S](FIGS. 15, 18, 21 and 65). In some embodiments, the CD28 ABD includes a VH that is at least 90, 95, 97, 98 or 99% identical to VH domain depicted in FIGS. 15-18, 21 and 65. In some embodiments, the CD28 ABD includes a VL that is at least 90, 95, 97, 98 or 99% identical to VL domain depicted in FIGS. 15-18, 21, 65 and 82.

[0510] In some embodiments, the CD28 ABD includes a VH and a VL that is at least 90, 95, 97, 98 or 99% identical to a VH domain and a VL domain depicted in FIGS. 15-18, 21 and 65. In certain embodiments, the CD28 ABD is capable of binding to CD28, as measured by at least one of a Biacore, surface plasmon resonance (SPR), flow cytometry, and/or BLI (biolayer interferometry, e.g., Octet assay) assay, with the latter finding particular use in many embodiments. In particular embodiments, the CD28 ABD is capable of binding human CD28 antigen (see FIG. 1).

[0511] In some embodiments, the CD28 binding domain of the subject anti-CD28 x anti-CEACAM5 antibody includes a VH that includes any one of the VHCDRI-3 or HFR1-4 sequences depicted in FIG. 19A. In some embodiments, the CD28 binding domain includes a VL that includes any one of the VLCDR1-3 or LFR1-4 sequences depicted in FIG. 19B.

[0512] In some embodiments, the anti-CD28 x anti-CEACAM5 antibody includes a CD28 binding domain that includes a VH and VL selected from the following:
[0513] (i) a VH comprising a vhCDR1, a vhCDR2, and a vhCDR3 having an amino acid sequence of a vhCDR1, a vhCDR2, and a vhCDR3, respectively, of a VH of any of the CD28 binding domains depicted in FIGS. 15, 18, 21 and 65 or a variant thereof; and (ii) a VL comprising a vlCDR1, a vlCDR2, and a vlCDR3 having an amino acid sequence of a vlCDR1, a vlCDR2, and a vlCDR3, respectively, of the VL of the CD28 binding domain depicted in FIGS. 15, 18, 21 and 65 or a variant thereof; or
[0514] (i) a VH comprising a vhCDR1, a vhCDR2, and a vhCDR3 having an amino acid sequence of a vhCDR1, a vhCDR2, and a vhCDR3, respectively, of a VH depicted in FIG. 15 or 16 or a variant thereof; and (ii) a VL comprising a vlCDR1, a vlCDR2, and a vlCDR3 having an amino acid sequence of a vlCDR1, a vlCDR2, and a vlCDR3, respectively, of a VL depicted in FIG. 15, 17, or 82 or a variant thereof.

[0515] In some embodiments, the anti-CD28 x anti-CEACAM5 antibody includes a CD28 binding domain that includes a VH and VL selected from the following:
[0516] (i) a VH having an amino acid sequence of a VH of any of the CD28 binding domains depicted in FIGS. 15, 18, 21 and 65 or a variant thereof; and (ii) a VL having an amino acid sequence of the VL of the CD28 binding domain depicted in FIGS. 15, 18, 21 and 65 or a variant thereof; or
[0517] (i) a VH having an amino acid sequence of a VH depicted in FIG. 15 or 16 or a variant thereof; and (ii) a VL having an amino acid sequence of the VL of a VL depicted in FIG. 15, 17, or 82 or a variant thereof.

[0518] In another aspect, provided herein is a CD28 binding domain that competes with any of the CD28 binding domains disclosed herein for binding to human CD28.

### B. CEACAM5 Binding Domains

[0519] In one aspect, provided herein are CEACAM5 antigen binding domain (ABD) compositions. In embodiments, the CEACAM5 ABDs include set of 6 CDRs as depicted in the sequence listing and FIG. 45 either as the CDRs are underlined or, in the case where a different numbering scheme is used as described herein and as shown in Table 2, as the CDRs that are identified using other alignments within the variable heavy (VH) domain and variable light domain (VL) sequences of those depicted in FIG. 45 and the sequence listing (see Table 2). Suitable CEACAM5 ABDs can also include the entire VH and VL sequences as depicted in these sequences and figures, used as scFvs or as Fab domains. In embodiments, the CEACAM5 ABD includes a variable heavy (VH) domain or variant thereof and/or variable light (VL) domain or variant thereof of any of the CEACAM5 binding domains disclosed herein (e.g., FIG. 45). Such CEACAM5 binding domains are useful, for example, for inclusion in the anti-CD28 x anti- CEACAM5 antibodies provided herein.

[0520] In exemplary embodiments, the CEACAM5 ABD includes the variable heavy (VH) domain and variable light (VL) domain of any one of the CEACAM5 ABDs described herein, including the figures and sequence listing. In exemplary embodiments, the CEACAM5 ABD is a CEACAM5 ABD depicted in FIG. 45. In exemplary embodiments, the CEACAM5 ABD comprises a VH and VL pair selected from those depicted in FIG. 45.

[0521] In addition to the parental CEACAM5 variable heavy and variable light domains disclosed herein, provided herein are CEACAM5 ABDs that include a variable heavy domain and/or a variable light domain that are variants of a CEACAM5 ABD VH and VL domain disclosed herein. In one embodiment, the variant VH domain and/or VL domain has from 1, 2, 3, 4, 5, 6, 7, 8, 9 or 10 amino acid changes from a VH and/or VL domain of a CEACAM5 ABD described herein, including the figures and sequence listing. In exemplary embodiments, the variant VH domain and/or VL domain has from 1, 2, 3, 4, 5, 6, 7, 8, 9 or 10 amino acid changes from a VH and/or VL domain of a CEACAM5 ABD depicted in FIG. 45. In some embodiments, the changes are in a VH domain depicted in FIG. 45. In some embodiments, the changes are in a VL domain are depicted in FIG. 45. In some embodiments, the changes are in a VH and VL domain are depicted in FIG. 45. In some embodiments, the one or more amino acid changes are in the VH and/or VL framework regions (FR1, FR2, FR3, and/or FR4). In some embodiments, the one or more amino acid change(s) are in one or more of vhCDR1-3 and/or vlCDR1-3. In some embodiments, the CEACAM5 variant includes the vhCDR1-3 and/or vlCDR1-3 of any of the CEACAM5 ABDs in FIG. 45. In certain embodiments, the CEACAM5 ABD is capable of binding to CEACAM5, as measured at least one of a Biacore, surface plasmon resonance (SPR), flow cytometry, and/or BLI (biolayer interferometry, e.g., Octet assay) assay, with the latter finding particular use in many embodiments. In particular embodiments, the CEACAM5 ABD is capable of binding human CEACAM5 antigen (FIG. 2).

[0522] In one embodiment, the variant VH and/or VL domain is at least 90, 95, 97, 98 or 99% identical to the VH and/or VL of a CEACAM5 ABD as described herein, including the figures and sequence listing. In exemplary embodiments, the variant VH and/or VL domain is at least 90, 95, 97, 98 or 99% identical to the VH and/or VL of a CEACAM5 ABD depicted in FIG. 45. In some embodiments, the CEACAM5 ABD includes a VH that is at least 90, 95, 97, 98 or 99% identical to VH domain depicted in FIG. 45. In some embodiments, the CEACAM5 ABD includes a VL that is at least 90, 95, 97, 98 or 99% identical to VL domain depicted in FIG. 45. In some embodiments, the CEACAM5 ABD includes a VH and a VL that is at least 90, 95, 97, 98 or 99% identical to a VH domain and a VL domain depicted in FIG. 45. In some embodiments, the CEACAM5 ABD includes the 6 CDRs (vhCDR1-3 and vlCDR1-3) of any of the CEACAM5 ABDs of FIG. 45. In certain embodiments, the CEACAM5 is capable of binding to the CEACAM5, as measured by at least one of a Biacore, surface plasmon resonance (SPR), flow cytometry, and/or BLI (biolayer interferometry, e.g., Octet assay) assay, with the latter finding particular use in many embodiments. In particular embodiments, the CEACAM5 ABD is capable of binding human CEACAM5 antigen (FIG. 2).

[0523] The anti-CD28 x anti-CEACAM5 antibodies provided herein include at least one CEACAM5 binding domain. Subject antibodies that include such CEACAM5 antigen binding domains (e.g., anti-CEACAM5 x anti-CD3 bispecific antibodies) advantageously target cells that express high levels of CEACAM5 over those that express levels of CEACAM5 (e.g., normal cells).

[0524] In some embodiments, the CEACAM5 ABD of the anti-CD28 x anti-CEACAM5 antibody includes the set of 6 CDRs as depicted in the sequence listing and FIG. 41 and FIG. 45, either as the CDRs are underlined or, in the case where a different numbering scheme is used as described herein and as shown in Table 2, as the CDRs that are identified using other alignments within the variable heavy (VH) domain and variable light domain (VL) sequences of those depicted in FIG. 41 and FIG. 45 and the sequence listing (see Table 2).

[0525] In exemplary embodiments, the CEACAM5 ABD of the anti-CD28 x anti-CEACAM5 antibody includes the variable heavy (VH) domain and variable light (VL) domain of any one of the CEACAM5 ABDs described herein, including the figures and sequence listing. In exemplary embodiments, the CEACAM5 ABD of the anti-CD28 x anti-CEACAM5 antibody is a CEACAM5 ABD depicted in FIG. 41 and FIG. 45.

[0526] In addition to the parental CEACAM5 variable heavy and variable light domains disclosed herein, provided herein are CEACAM5 ABDs that include a variable heavy domain and/or a variable light domain that are variants of a CEACAM5 ABD VH and VL domain disclosed herein. In one embodiment, the variant VH domain and/or VL domain has from 1, 2, 3, 4, 5, 6, 7, 8, 9 or 10 amino acid changes from a VH and/or VL domain of a CEACAM5 ABD described herein, including the figures and sequence listing. In exemplary embodiments, the variant VH domain and/or VL domain has from 1, 2, 3, 4, 5, 6, 7, 8, 9 or 10 amino acid changes from a VH and/or VL domain of a CEACAM5 ABD depicted in FIG. 41 and FIG. 45. In some embodiments, the changes are in a VH domain depicted in FIG. 41 and FIG. 45. In some embodiments, the changes are in a VL domain are depicted in FIG. 41 and FIG. 45. In some embodiments, the changes are in a VH and VL domain are depicted in FIG. 41 and FIG. 45. In some embodiments, the one or more amino acid changes are in the VH and/or VL framework regions (FR1, FR2, FR3, and/or FR4). In some embodiments, the one or more amino acid change(s) are in one or more of vhCDR1-3 and/or vlCDR1-3. In some embodiments, the CEACAM5 variant includes the vhCDR1-3 and/or vlCDR1-3 of any of the CEACAM5 ABDs in FIG. 41 and FIG. 45. In certain embodiments, the CEACAM5 ABD of the anti-CD28 x anti-CEACAM5 antibody is capable of binding to CEACAM5, as measured at least one of a Biacore, surface plasmon resonance (SPR), flow cytometry, and/or BLI (biolayer interferometry, e.g., Octet assay) assay, with the latter finding particular use in many embodiments. In particular embodiments, the CEACAM5 ABD is capable of binding human CEACAM5 antigen (FIG. 2).

[0527] In one embodiment, the variant VH and/or VL domain is at least 90, 95, 97, 98 or 99% identical to the VH and/or VL of a CEACAM5 ABD as described herein, including the figures and sequence listing. In exemplary embodiments, the variant VH and/or VL domain is at least 90, 95, 97, 98 or 99% identical to the VH and/or VL of a CEACAM5 ABD depicted in FIG. 41 and FIG. 45. In some embodiments, the CEACAM5 ABD includes a VH that is at least 90, 95, 97, 98 or 99% identical to VH domain depicted in FIG. 41 and FIG. 45. In some embodiments, the CEACAM5 ABD includes a VL that is at least 90, 95, 97, 98 or 99% identical to VL domain depicted in FIG. 41 and FIG. 45. In some embodiments, the CEACAM5 ABD includes a VH and a VL that is at least 90, 95, 97, 98 or 99% identical to a VH domain and a VL domain depicted in FIG. 41 and FIG. 45. In some embodiments, the CEACAM5 ABD includes the 6 CDRs (vhCDR1-3 and vlCDR1-3) of any of the CEACAM5 ABDs of FIG. 41 and FIG. 45. In certain embodiments, the CEACAM5 ABD of the anti-CD28 x anti-CEACAM5 antibody is capable of binding to the CEACAM5, as measured by at least one of a Biacore, surface plasmon resonance (SPR), flow cytometry, and/or BLI (biolayer interferometry, e.g., Octet assay) assay, with the latter finding particular use in many embodiments. In particular embodiments, the CEACAM5 ABD is capable of binding human CEACAM5 antigen (FIG. 2).

[0528] In some embodiments, the anti-CD28 x anti-CEACAM5 antibody is a bivalent antibody (e.g., 1+1 Fab-scFv-Fc format antibody) that includes one CEACAM5 binding domain. In other embodiments, the anti-CD28 x anti-CEACAM5 antibody is a trivalent antibody (e.g., 2+1 mAb-scFv, 2+1 Fab2.scFv-Fc, and 2+1 Fab2-Fc x scFv-Fc format antibodies) that includes two CEACAM5 binding domains.

[0529] In another aspect, provided herein is a CEACAM5 binding domain that competes with any of the PD-L1 binding domains disclosed herein for binding to human CEACAM5.

### C. Chimeric and Humanized Antibodies

[0530] In certain embodiments, the subject antibodies provided herein include a heavy chain variable region from a particular germline heavy chain immunoglobulin gene and/or a light chain variable region from a particular germline light chain immunoglobulin gene. For example, such antibodies may comprise or consist of a human antibody comprising heavy or light chain variable regions that are “the product of” or “derived from” a particular germline sequence. A human antibody that is “the product of” or “derived from” a human germline immunoglobulin sequence can be identified as such by comparing the amino acid sequence of the human antibody to the amino acid sequences of human germline immunoglobulins and selecting the human germline immunoglobulin sequence that is closest in sequence (i.e., greatest % identity) to the sequence of the human antibody (using the methods outlined herein). A human antibody that is “the product of” or “derived from” a particular human germline immunoglobulin sequence may contain amino acid differences as compared to the germline sequence, due to, for example, naturally-occurring somatic mutations or intentional introduction of site-directed mutation. However, a humanized antibody typically is at least 90% identical in amino acids sequence to an amino acid sequence encoded by a human germline immunoglobulin gene and contains amino acid residues that identify the antibody as being derived from human sequences when compared to the germline immunoglobulin amino acid sequences of other species (e.g., murine germline sequences). In certain cases, a humanized antibody may be at least 95, 96, 97, 98 or 99%, or even at least 96%, 97%, 98%, or 99% identical in amino acid sequence to the amino acid sequence encoded by the germline immunoglobulin gene. Typically, a humanized antibody derived from a particular human germline sequence will display no more than 10⁻²⁰ amino acid differences from the amino acid sequence encoded by the human germline immunoglobulin gene (prior to the introduction of any skew, pI and ablation variants herein; that is, the number of variants is generally low, prior to the introduction of the variants of the invention). In certain cases, the humanized antibody may display no more than 5, or even no more than 4, 3, 2, or 1 amino acid difference from the amino acid sequence encoded by the germline immunoglobulin gene (again, prior to the introduction of any skew, pI and ablation variants herein; that is, the number of variants is generally low, prior to the introduction of the variants of the invention).

[0531] In one embodiment, the parent antibody has been affinity matured, as is known in the art. Structure-based methods may be employed for humanization and affinity maturation, for example as described in U.S. Ser. No. 11/004,590. Selection based methods may be employed to humanize and/or affinity mature antibody variable regions, including but not limited to methods described in Wu et al., 1999, J. Mol. Biol. 294:151-162; Baca et al., 1997, J. Biol. Chem. 272(16):10678-10684; Rosok et al., 1996, J. Biol. Chem. 271(37): 22611-22618; Rader et al., 1998, Proc. Natl. Acad. Sci. USA 95: 8910-8915; Krauss et al., 2003, Protein Engineering 16(10):753-759, all entirely incorporated by reference. Other humanization methods may involve the grafting of only parts of the CDRs, including but not limited to methods described in U.S. Ser. No. 09/810,510; Tan et al., 2002, J. Immunol. 169:1119-1125; De Pascalis et al., 2002, J. Immunol. 169:3076-3084, all entirely incorporated by reference.

### D. Heterodimeric Antibodies

[0532] In exemplary embodiments, the anti-CD28 x anti-CEACAM5 antibodies provided herein are heterodimeric bispecific antibodies that include two variant Fc domain sequences. Such variant Fc domains include amino acid modifications to facilitate the self-assembly and/or purification of the heterodimeric antibodies.

[0533] An ongoing problem in antibody technologies is the desire for “bispecific” antibodies that bind to two different antigens simultaneously, in general thus allowing the different antigens to be brought into proximity and resulting in new functionalities and new therapies. In general, these antibodies are made by including genes for each heavy and light chain into the host cells. This generally results in the formation of the desired heterodimer (A-B), as well as the two homodimers (A-A and B-B (not including the light chain heterodimeric issues)). However, a major obstacle in the formation of bispecific antibodies is the difficulty in biasing the formation of the desired heterodimeric antibody over the formation of the homodimers and/or purifying the heterodimeric antibody away from the homodimers.

[0534] There are a number of mechanisms that can be used to generate the subject heterodimeric antibodies. In addition, as will be appreciated by those in the art, these different mechanisms can be combined to ensure high heterodimerization. Amino acid modifications that facilitate the production and purification of heterodimers are collectively referred to generally as “heterodimerization variants.” As discussed below, heterodimerization variants include “skew” variants (e.g., the “knobs and holes” and the “charge pairs” variants described below) as well as “pI variants,” which allow purification of heterodimers from homodimers.

[0535] As is generally described in U.S. Pat. No. 9,605,084, hereby incorporated by reference in its entirety and specifically as below for the discussion of heterodimerization variants, useful mechanisms for heterodimerization include “knobs and holes” (“KIH”) as described in U.S. Pat. No. 9,605,084, “electrostatic steering” or “charge pairs” as described in U.S. Pat. No. 9,605,084, pI variants as described in U.S. Pat. No. 9,605,084, and general additional Fc variants as outlined in U.S. Pat. No. 9,605,084 and below.

[0536] Heterodimerization variants that are useful for the formation and purification of the subject heterodimeric antibody (e.g., bispecific antibodies) are further discussed in detailed below.

### 1. Skew Variants

[0537] In some embodiments, the heterodimeric antibody includes skew variants which are one or more amino acid modifications in a first Fc domain (A) and/or a second Fc domain (B) that favor the formation of Fc heterodimers (Fc dimers that include the first and the second Fc domain; (A-B) over Fc homodimers (Fc dimers that include two of the first Fc domain or two of the second Fc domain; A-A or B-B). Suitable skew variants are included in the FIG. 29 of US Publ. App. No. 2016/0355608, hereby incorporated by reference in its entirety and specifically for its disclosure of skew variants, as well as in FIGS. 3 and 8.

[0538] One particular type of skew variants is generally referred to in the art as “knobs and holes,” referring to amino acid engineering that creates steric influences to favor heterodimeric formation and disfavor homodimeric formation, as described in U.S. Ser. No. 61/596,846, Ridgway et al., Protein Engineering 9(7):617 (1996); Atwell et al., J. Mol. Biol. 1997 270:26; U.S. Pat. No. 8,216,805, all of which are hereby incorporated by reference in their entirety and specifically for the disclosure of “knobs and holes” mutations. This is sometime referred to herein as “steric variants.” The figures identify a number of “monomer A- monomer B” pairs that rely on “knobs and holes.” In addition, as described in Merchant et al., Nature Biotech. 16:677 (1998), these “knobs and holes” mutations can be combined with disulfide bonds to further favor formation of Fc heterodimers.

[0539] Another method that finds use in the generation of heterodimers is sometimes referred to as “electrostatic steering” as described in Gunasekaran et al., J. Biol. Chem. 285(25):19637 (2010), hereby incorporated by reference in its entirety. This is sometimes referred to herein as “charge pairs.” In this embodiment, electrostatics are used to skew the formation towards heterodimerization. As those in the art will appreciate, these may also have an effect on pI, and thus on purification, and thus could in some cases also be considered pI variants. However, as these were generated to force heterodimerization and were not used as purification tools, they are classified as “skew variants.” These include, but are not limited to, D221E/P228E/L368E paired with D221R/P228R/K409R (e.g., these are “monomer corresponding sets) and C220E/P228E/368E paired with C220R/E224R/P228R/K409R.

[0540] In some embodiments, the skew variants advantageously and simultaneously favor heterodimerization based on both the “knobs and holes” mechanism as well as the “electrostatic steering” mechanism. In some embodiments, the heterodimeric antibody includes one or more sets of such heterodimerization skew variants. These variants come in “pairs” of “sets.” That is, one set of the pair is incorporated into the first monomer and the other set of the pair is incorporated into the second monomer. It should be noted that these sets do not necessarily behave as “knobs in holes” variants, with a one-to-one correspondence between a residue on one monomer and a residue on the other. That is, these pairs of sets may instead form an interface between the two monomers that encourages heterodimer formation and discourages homodimer formation, allowing the percentage of heterodimers that spontaneously form under biological conditions to be over 90%, rather than the expected 50% (25% homodimer A/A:50% heterodimer A/B:25% homodimer B/B). Exemplary heterodimerization “skew” variants are depicted in FIGS. 3 and 8. Such “skew” variants include, but are not limited to: S364K/E357Q: L368D/K370S; L368D/K370S: S364K; L368E/K370S: S364K; T411T/E360E/Q362E: D401K; L368D/K370S: S364K/E357L; K370S: S364K/E357Q (EU numbering).

[0541] In exemplary embodiments, the heterodimeric antibody includes a S364K/E357Q: L368D/K370S; L368D/K370S: S364K; L368E/K370S: S364K; T411T/E360E/Q362E: D401K; L368D/K370S: S364K/E357L; K370S: S364K/E357Q; or a T366S/L368A/Y407V: T366W (optionally including a bridging disulfide, T366S/L368A/Y407V/Y349C: T366W/S354C) “skew” variant amino acid substitution set (EU numbering). In an exemplary embodiment, the heterodimeric antibody includes a “S364K/E357Q: L368D/K370S” amino acid substitution set. In terms of nomenclature, the pair “S364K/E357Q: L368D/K370S” means that one of the monomers includes an Fc domain that includes the amino acid substitutions S364K and E357Q and the other monomer includes an Fc domain that includes the amino acid substitutions L368D and K370S; as above, the “strandedness” of these pairs depends on the starting pI.

[0542] In some embodiments, the skew variants provided herein can be optionally and independently incorporated with any other modifications, including, but not limited to, other skew variants (see, e.g., in FIG. 37 of US Publ. App. No. 2012/0149876, herein incorporated by reference, particularly for its disclosure of skew variants), pI variants, isotopic variants, FcRn variants, ablation variants, etc. into one or both of the first and second Fc domains of the heterodimeric antibody. Further, individual modifications can also independently and optionally be included or excluded from the subject the heterodimeric antibody.

[0543] In some embodiments, the skew variants outlined herein can be optionally and independently incorporated with any pI variant (or other variants such as Fc variants, FcRn variants, etc.) into one or both heavy chain monomers, and can be independently and optionally included or excluded from the subject heterodimeric antibodies. 2. Purification Variants

[0544] In some embodiments, the heterodimeric antibody includes purification variants that advantageously allow for the separation of heterodimeric proteins (e.g., anti-CD28 x anti-CEACAM5 bispecific antibody) from homodimeric proteins.

[0545] There are several basic mechanisms that can lead to ease of purifying heterodimeric antibodies. For example, modifications to one or both of the antibody heavy chain monomers A and B such that each monomer has a different pI allows for the isoelectric purification of heterodimeric A-B antibody from monomeric A-A and B-B proteins.

[0546] Alternatively, some scaffold formats, such as the “1+1 Fab-scFv-Fc” format, and the “2+1 Fab2-scFv-Fc” format, allows separation on the basis of size. As described above, it is also possible to “skew” the formation of heterodimers over homodimers using skew variants.

[0547] Thus, a combination of heterodimerization skew variants and purification variants find particular use in the heterodimeric antibodies provided herein.

[0548] Additionally, as more fully outlined below, depending on the format of the heterodimeric antibody, purification variants either contained within the constant region and/or Fc domains of a monomer, and/or domain linkers can be used. In some embodiments, the heterodimeric antibody includes additional modifications for alternative functionalities that can also create pI changes, such as Fc, FcRn and KO variants.

[0549] In some embodiments, the subject heterodimeric antibodies provided herein include at least one monomer with one or more modifications that alter the pI of the monomer (i.e., a “pI variant”). In general, as will be appreciated by those in the art, there are two general categories of pI variants: those that increase the pI of the protein (basic changes) and those that decrease the pI of the protein (acidic changes). As described herein, all combinations of these variants can be done: one monomer may be wild type, or a variant that does not display a significantly different pI from wild-type, and the other can be either more basic or more acidic. Alternatively, each monomer is changed, one to more basic and one to more acidic.

[0550] Depending on the format of the heterodimer antibody, pI variants can be either contained within the constant and/or Fc domains of a monomer, or charged linkers, either domain linkers or scFv linkers, can be used. That is, antibody formats that utilize scFv(s) such as “1+1 Fab-scFv-Fc”, format can include charged scFv linkers (either positive or negative), that give a further pI boost for purification purposes. As will be appreciated by those in the art, some 1+1 Fab-scFv-Fc and 2+1 Fab2-scFv-Fc formats are useful with just charged scFv linkers and no additional pI adjustments, although the invention does provide pI variants that are on one or both of the monomers, and/or charged domain linkers as well. In addition, additional amino acid engineering for alternative functionalities may also confer pI changes, such as Fc, FcRn and KO variants.

[0551] In subject heterodimeric antibodies that utilizes pI as a separation mechanism to allow the purification of heterodimeric proteins, amino acid variants are introduced into one or both of the monomer polypeptides. That is, the pI of one of the monomers (referred to herein for simplicity as “monomer A”) can be engineered away from monomer B, or both monomer A and B change be changed, with the pI of monomer A increasing and the pI of monomer B decreasing. As is outlined more fully below, the pI changes of either or both monomers can be done by removing or adding a charged residue (e.g., a neutral amino acid is replaced by a positively or negatively charged amino acid residue, e.g., glycine to glutamic acid), changing a charged residue from positive or negative to the opposite charge (aspartic acid to lysine) or changing a charged residue to a neutral residue (e.g., loss of a charge; lysine to serine.). A number of these variants are shown in the FIGS. 3 and 4.

[0552] Thus, in some embodiments, the subject heterodimeric antibody includes amino acid modifications in the constant regions that alter the isoelectric point (pI) of at least one, if not both, of the monomers of a dimeric protein to form “pI antibodies”) by incorporating amino acid substitutions (“pI variants” or “pI substitutions”) into one or both of the monomers. As shown herein, the separation of the heterodimers from the two homodimers can be accomplished if the pIs of the two monomers differ by as little as 0.1 pH unit, with 0.2, 0.3, 0.4 and 0.5 or greater all finding use in the present invention.

[0553] As will be appreciated by those in the art, the number of pI variants to be included on each or both monomer(s) to get good separation will depend in part on the starting pI of the components, for example in the 1+1 Fab-scFv-Fc, 2+1 Fab2-scFv-Fc, 1+1 CLC and 2+1 CLC formats, the starting pI of the scFv (1+1 Fab-scFv-Fc, 2+1 Fab2-scFv-Fc) and Fab(s) of interest. That is, to determine which monomer to engineer or in which “direction” (e.g., more positive or more negative), the Fv sequences of the two target antigens are calculated and a decision is made from there. As is known in the art, different Fvs will have different starting pIs which are exploited in the present invention. In general, as outlined herein, the pIs are engineered to result in a total pI difference of each monomer of at least about 0.1 logs, with 0.2 to 0.5 being preferred as outlined herein.

[0554] In the case where pI variants are used to achieve heterodimerization, by using the constant region(s) of the heavy chain(s), a more modular approach to designing and purifying bispecific proteins, including antibodies, is provided. Thus, in some embodiments, heterodimerization variants (including skew and pI heterodimerization variants) are not included in the variable regions, such that each individual antibody must be engineered. In addition, in some embodiments, the possibility of immunogenicity resulting from the pI variants is significantly reduced by importing pI variants from different IgG isotypes such that pI is changed without introducing significant immunogenicity. Thus, an additional problem to be solved is the elucidation of low pI constant domains with high human sequence content, e.g., the minimization or avoidance of non-human residues at any particular position.

[0555] Alternatively or in addition to isotypic substitutions, the possibility of immunogenicity resulting from the pI variants is significantly reduced by utilizing isosteric substitutions (e.g. Asn to Asp; and Gln to Glu).

[0556] As discussed below, a side benefit that can occur with this pI engineering is also the extension of serum half-life and increased FcRn binding. That is, as described in US Publ. App. No. US 2012/0028304 (incorporated by reference in its entirety), lowering the pI of antibody constant domains (including those found in antibodies and Fc fusions) can lead to longer serum retention in vivo. These pI variants for increased serum half-life also facilitate pI changes for purification.

[0557] In addition, it should be noted that the pI variants give an additional benefit for the analytics and quality control process of bispecific antibodies, as the ability to either eliminate, minimize and distinguish when homodimers are present is significant. Similarly, the ability to reliably test the reproducibility of the heterodimeric antibody production is important.

[0558] In general, embodiments of particular use rely on sets of variants that include skew variants, which encourage heterodimerization formation over homodimerization formation, coupled with pI variants, which increase the pI difference between the two monomers to facilitate purification of heterodimers away from homodimers.

[0559] Exemplary combinations of pI variants are shown in FIGS. 3 and 4, and FIG. 30 of US Publ. App. No. 2016/0355608, all of which are herein incorporated by reference in its entirety and specifically for the disclosure of pI variants. Preferred combinations of pI variants are shown in FIGS. 3 and 4. As outlined herein and shown in the figures, these changes are shown relative to IgG1, but all isotypes can be altered this way, as well as isotype hybrids. In the case where the heavy chain constant domain is from IgG2-4, R133E and R133Q can also be used.

[0560] In one embodiment, a preferred combination of pI variants has one monomer (the negative Fab side) comprising 208D/295E/384D/418E/421D variants (N208D/Q295E/N384D/Q418E/N421D when relative to human IgG1) and a second monomer (the positive scFv side) comprising a positively charged scFv linker, including (GKPGS)₄(SEQ ID NO: 24). However, as will be appreciated by those in the art, the first monomer includes a CH1 domain, including position 208. Accordingly, in constructs that do not include a CH1 domain (for example for antibodies that do not utilize a CH1 domain on one of the domains), a preferred negative pI variant Fc set includes 295E/384D/418E/421D variants (Q295E/N384D/Q418E/N421D when relative to human IgG1).

[0561] Accordingly, in some embodiments, one monomer has a set of substitutions from FIG. 8 and the other monomer has a charged linker (either in the form of a charged scFv linker because that monomer comprises an scFv or a charged domain linker, as the format dictates, which can be selected from those depicted in FIG. 6).

[0562] In some embodiments, modifications are made in the hinge of the Fc domain, including positions 216, 217, 218, 219, 220, 221, 222, 223, 224, 225, 226, 227, 228, 229, and 230 based on EU numbering. Thus, pI mutations and particularly substitutions can be made in one or more of positions 216-230, with 1, 2, 3, 4 or 5 mutations finding use. Again, all possible combinations are contemplated, alone or with other pI variants in other domains.

[0563] Specific substitutions that find use in lowering the pI of hinge domains include, but are not limited to, a deletion at position 221, a non-native valine or threonine at position 222, a deletion at position 223, a non-native glutamic acid at position 224, a deletion at position 225, a deletion at position 235 and a deletion or a non-native alanine at position 236. In some cases, only pI substitutions are done in the hinge domain, and in others, these substitution(s) are added to other pI variants in other domains in any combination.

[0564] In some embodiments, mutations can be made in the CH2 region, including positions 233, 234, 235, 236, 274, 296, 300, 309, 320, 322, 326, 327, 334 and 339, based on EU numbering. It should be noted that changes in 233-236 can be made to increase effector function (along with 327A) in the IgG2 backbone. Again, all possible combinations of these 14 positions can be made; e.g., an antibody provided herein may include a variant Fc domain with 1, 2, 3, 4, 5, 6, 7, 8, 9 or 10 CH2 pI substitutions.

[0565] Specific substitutions that find use in lowering the pI of CH2 domains include, but are not limited to, a non-native glutamine or glutamic acid at position 274, a non-native phenylalanine at position 296, a non-native phenylalanine at position 300, a non-native valine at position 309, a non-native glutamic acid at position 320, a non-native glutamic acid at position 322, a non-native glutamic acid at position 326, a non-native glycine at position 327, a non-native glutamic acid at position 334, a non-native threonine at position 339, and all possible combinations within CH2 and with other domains.

[0566] In this embodiment, the modifications can be independently and optionally selected from position 355, 359, 362, 384, 389,392, 397, 418, 419, 444 and 447 (EU numbering) of the CH3 region. Specific substitutions that find use in lowering the pI of CH3 domains include, but are not limited to, a non-native glutamine or glutamic acid at position 355, a non-native serine at position 384, a non-native asparagine or glutamic acid at position 392, a non-native methionine at position 397, a non-native glutamic acid at position 419, a non-native glutamic acid at position 359, a non-native glutamic acid at position 362, a non-native glutamic acid at position 389, a non-native glutamic acid at position 418, a non-native glutamic acid at position 444, and a deletion or non-native aspartic acid at position 447.

[0567] In some embodiments, the anti-CD28 x anti-CEACAM5 antibody includes amino acid substitutions in one of its Fc domains that reduces binding to Protein A. Such purification variants produces heterodimers with asymmetric binding to Protein A, which can in turn be used for separation of heterodimeric from homodimeric populations by a pH gradient. Exemplary purification amino acid substitutions that reduce binding to Protein A include, but are not limited to H435R and Y436F (IgG1 CH3 domain, EU numbering). See, e.g., US2010331527, which is incorporated by reference in its entirety, and specifically for pertinent disclosures relating to Fc domain modifications to reduce Protein A binding. 3. Isotypic Variants

[0568] In addition, many embodiments of the subject heterodimeric antibodies rely on the “importation” of pI amino acids at particular positions from one IgG isotype into another, thus reducing or eliminating the possibility of unwanted immunogenicity being introduced into the variants. A number of these are shown in FIG. 21 of US Publ. 2014/0370013, hereby incorporated by reference. That is, IgG1 is a common isotype for therapeutic antibodies for a variety of reasons, including high effector function. However, the heavy constant region of IgG1 has a higher pI than that of IgG2 (8.10 versus 7.31). By introducing IgG2 residues at particular positions into the IgG1 backbone, the pI of the resulting monomer is lowered (or increased) and additionally exhibits longer serum half-life. For example, IgG1 has a glycine (pI 5.97) at position 137, and IgG2 has a glutamic acid (pI 3.22); importing the glutamic acid will affect the pI of the resulting protein. As is described below, a number of amino acid substitutions are generally required to significant affect the pI of the variant antibody. However, it should be noted as discussed below that even changes in IgG2 molecules allow for increased serum half-life.

[0569] In other embodiments, non-isotypic amino acid changes are made, either to reduce the overall charge state of the resulting protein (e.g., by changing a higher pI amino acid to a lower pI amino acid), or to allow accommodations in structure for stability, etc. as is further described below.

[0570] In addition, by pI engineering both the heavy and light constant domains, significant changes in each monomer of the heterodimer can be seen. As discussed herein, having the pIs of the two monomers differ by at least 0.5 can allow separation by ion exchange chromatography or isoelectric focusing, or other methods sensitive to isoelectric point. 4. Calculating pI

[0571] The pI of each monomer of the antibodies provided herein can depend on the pI of the variant heavy chain constant domain and the pI of the total monomer, including the variant heavy chain constant domain and the fusion partner. Thus, in some embodiments, the change in pI is calculated on the basis of the variant heavy chain constant domain, using the chart in the FIG. 19 of US Pub. 2014/0370013. As discussed herein, which monomer to engineer is generally decided by the inherent pI of the Fv and scaffold regions. Alternatively, the pI of each monomer can be compared. 5. pI Variants that also confer better FcRn in vivo binding

[0572] In the case where the pI variant decreases the pI of the monomer, the pI variant can have the added benefit of improving serum retention in vivo.

[0573] Although still under examination, Fc regions are believed to have longer half-lives in vivo, because binding to FcRn at pH 6 in an endosome sequesters the Fc (Ghetie and Ward, 1997 Immunol Today. 18(12): 592-598, entirely incorporated by reference). The endosomal compartment then recycles the Fc to the cell surface. Once the compartment opens to the extracellular space, the higher pH, ˜7.4, induces the release of Fc back into the blood.

[0574] In mice, Dall′ Acqua et al. showed that Fc mutants with increased FcRn binding at pH 6 and pH 7.4 actually had reduced serum concentrations and the same half-life as wild-type Fc (Dall′ Acqua et al. 2002, J. Immunol. 169:5171-5180, entirely incorporated by reference).

[0575] The increased affinity of Fc for FcRn at pH 7.4 is thought to forbid the release of the Fc back into the blood. Therefore, the Fc mutations that will increase Fc's half-life in vivo will ideally increase FcRn binding at the lower pH while still allowing release of Fc at higher pH. The amino acid histidine changes its charge state in the pH range of 6.0 to 7.4. Therefore, it is not surprising to find His residues at important positions in the Fc/FcRn complex.

[0576] Recently it has been suggested that antibodies with variable regions that have lower isoelectric points may also have longer serum half-lives (Igawa et al., 2010 PEDS. 23(5): 385-392, entirely incorporated by reference). However, the mechanism of this is still poorly understood. Moreover, variable regions differ from antibody to antibody. Constant region variants with reduced pI and extended half-life would provide a more modular approach to improving the pharmacokinetic properties of antibodies, as described herein.

### E. Additional Fc Variants for Additional Functionality

[0577] In addition to the heterodimerization variants discussed above, there are a number of useful Fc amino acid modification that can be made for a variety of reasons, including, but not limited to, altering binding to one or more FcγR receptors, altered binding to FcRn receptors, etc., as discussed below.

[0578] Accordingly, the antibodies provided herein (heterodimeric, as well as homodimeric) can include such amino acid modifications with or without the heterodimerization variants outlined herein (e.g., the pI variants and steric variants). Each set of variants can be independently and optionally included or excluded from any particular heterodimeric protein. 1. FcγR and FcRn Variants

[0579] Accordingly, there are a number of useful Fc substitutions that can be made to alter binding to one or more of the FcγR receptors. In certain embodiments, the subject antibody includes modifications that alter the binding to one or more FcγR receptors (i.e., “FcγR variants”). Substitutions that result in increased binding as well as decreased binding can be useful. For example, it is known that increased binding to FcγRIIIa generally results in increased ADCC (antibody dependent cell-mediated cytotoxicity; the cell-mediated reaction wherein nonspecific cytotoxic cells that express FcγRs recognize bound antibody on a target cell and subsequently cause lysis of the target cell). Similarly, decreased binding to FcγRIIb (an inhibitory receptor) can be beneficial as well in some circumstances. Amino acid substitutions that find use in the subject antibodies include those listed in U.S. Pat. Nos. 8,188,321 (particularly FIG. 41) and 8,084,582, and US Publ. App. Nos. 20060235208 and 20070148170, all of which are expressly incorporated herein by reference in their entirety and specifically for the variants disclosed therein that affect Fcγ receptor binding. Particular variants that find use include, but are not limited to, 236A, 239D, 239E, 332E, 332D, 239D/332E, 267D, 267E, 328F, 267E/328F, 236A/332E, 239D/332E/330Y, 239D, 332E/330L, 243A, 243L, 264A, 264V and 299T. Such modification may be included in one or both Fc domains of the subject antibody.

[0580] In some embodiments, the subject antibody includes one or more Fc modifications that increase serum half-life. Fc substitutions that find use in increased binding to the FcRn receptor and increased serum half-life, as specifically disclosed in U.S. Ser. No. 12/341,769, hereby incorporated by reference in its entirety, including, but not limited to, 434S, 434A, 428L, 308F, 2591, 428L/434S, 2591/308F, 4361/428L, 4361 or V/434S, 436V/428L, 259I/308F/428L, and M252Y/S254T/T256E. Such modification may be included in one or both Fc domains of the subject antibody. 2. Ablation Variants

[0581] In some embodiments, the heterodimeric antibody includes one or more modifications that reduce or remove the normal binding of the Fc domain to one or more or all of the Fcγ receptors (e.g., FcγR1, FcγRIIa, FcγRIIb, FcγRIIIa, etc.) to avoid additional mechanisms of action. Such modifications are referred to as “FcγR ablation variants” or “Fc knock out (FcKO or KO)” variants. In these embodiments, for some therapeutic applications, it is desirable to reduce or remove the normal binding of the Fc domain to one or more or all of the Fcγ receptors (e.g., FcγR1, FcγRIIa, FcγRIIb, FcγRIIIa, etc.) to avoid additional mechanisms of action. That is, for example, in many embodiments, particularly in the use of bispecific antibodies that bind CD28 monovalently, it is generally desirable to ablate FcγRIIIa binding to eliminate or significantly reduce ADCC activity. In some embodiments, of the subject antibodies described herein, at least one of the Fc domains comprises one or more Fcγ receptor ablation variants. In some embodiments, of the subject antibodies described herein, both of the Fc domains comprises one or more Fcγ receptor ablation variants. These ablation variants are depicted in FIG. 5, and each can be independently and optionally included or excluded, with preferred aspects utilizing ablation variants selected from the group consisting of. L234A/L235A/D265S, G236R/L328R, E233P/L234V/L235A/G236del/S239K, E233P/L234V/L235A/G236del/S267K, E233P/L234V/L235A/G236del/S239K/A327G, E233P/L234V/L235A/G236del/S267K/A327G and E233P/L234V/L235A/G236del. It should be noted that the ablation variants referenced herein ablate FcγR binding but generally not FcRn binding.

[0582] As is known in the art, the Fc domain of human IgG1 has the highest binding to the Fcγ receptors, and thus ablation variants can be used when the constant domain (or Fc domain) in the backbone of the heterodimeric antibody is IgG1. Alternatively, or in addition to ablation variants in an IgG1 background, mutations at the glycosylation position 297 (generally to A or S) can significantly ablate binding to FcγRIIIa, for example. Human IgG2 and IgG4 have naturally reduced binding to the Fcγ receptors, and thus those backbones can be used with or without the ablation variants.

### F. Combination of Heterodimeric and Fc Variants

[0583] As will be appreciated by those in the art, all of the recited heterodimerization variants (including skew and/or purification variants) can be optionally and independently combined in any way, as long as they retain their “strandedness” or “monomer partition.” In addition, all of these variants can be combined into any of the heterodimerization formats.

[0584] In the case of pI variants, while embodiments finding particular use are shown in the figures, other combinations can be generated, following the basic rule of altering the pI difference between two monomers to facilitate purification.

[0585] In addition, any of the heterodimerization variants (skew and purification variants), are also independently and optionally combined with Fc ablation variants, Fc variants, FcRn variants, as generally outlined herein.

[0586] Exemplary combination of variants that are included in some embodiments of the heterodimeric 1+1 Fab-scFv-Fc, 2+1 mAb-Fc, 2+1 Fab2-scFv-Fc, and 2+1 Fab2-Fc x scFv-Fc format antibodies are included in FIG. 8. In some embodiments, the heterodimeric antibody includes a combination of variants as depicted in FIG. 8.

### G. Useful Antibody Formats

[0587] As will be appreciated by those in the art and discussed more fully below, the heterodimeric bispecific antibodies provided herein can take on several different configurations as generally depicted in FIG. 14.

[0588] As will be appreciated by those in the art, the heterodimeric formats of the invention can have different valences as well as be bispecific. That is, heterodimeric antibodies of the invention can be bivalent and bispecific, or trivalent and bispecific, wherein the first antigen is bound by two binding domains and the second antigen by a second binding domain. As is outlined herein, when CD28 is one of the target antigens, it is preferable that the CD28 is bound only monovalently.

[0589] The present invention utilizes CD28 binding domains in combination with CEACAM5 binding domains. As will be appreciated by those in the art, any collection of anti-CD28 CDRs, anti-CD28 variable light and variable heavy domains, Fabs and scFvs as depicted in any of the Figures (see particularly FIGS. 15-18, 21 and 48) or variants thereof can be used. Similarly, any of the CEACAM5 antigen binding domains can be used, whether CDRs, variable light and variable heavy domains, Fabs and scFvs as depicted in any of the figures (e.g., FIG. 41 and FIG. 45) or variants thereof can be used, optionally and independently combined in any combination.

1. 1+1 Fab-scFv-Fc format

[0590] One heterodimeric antibody format that finds particular use in subject anti-CD28 x anti-CEACAM5 antibodies provided herein is the “1+1 Fab-scFv-Fc” or “bottle opener” format as shown in FIG. 14A. The 1+1 Fab-scFv-Fc format antibody includes a first monomer that is a “regular” heavy chain (VH1-CH1-hinge-CH2-CH3), wherein VH1 is a first variable heavy domain and CH2-CH3 is a first Fc domain. The 1+1 Fab-scFv-Fc also includes a light chain that includes a first variable light domain VL1 and a constant light domain CL. The light chain interacts with the VH1-CH1 of the first monomer to form a first antigen binding domain that is a Fab. The second monomer of the antibody includes a second binding domain that is a single chain Fv (“scFv,” as defined below) and a second Fc domain.

[0591] The scFv includes a second variable heavy domain (VH2) and a second variable light domain (VL2), wherein the VH2 is attached to the VL2 using an scFv linker that can be charged (see, e.g., FIG. 6). The scFv is attached to the heavy chain using a domain linker (see, e.g., FIG. 7). The two monomers are brought together by the use of amino acid variants (e.g., heterodimerization variants, discussed above) in the constant regions (e.g., the Fc domain, the CH1 domain and/or the hinge region) that promote the formation of heterodimeric antibodies as is described more fully below. This structure is sometimes referred to herein as the “bottle-opener” format, due to a rough visual similarity to a bottle-opener. In some embodiments, the 1+1 Fab-scFv-Fc format antibody is a bivalent antibody.

[0592] There are several distinct advantages to the present “1+1 Fab-scFv-Fc” format. As is known in the art, antibody analogs relying on two scFv constructs often have stability and aggregation problems, which can be alleviated in the present invention by the addition of a “regular” heavy and light chain pairing. In addition, as opposed to formats that rely on two heavy chains and two light chains, there is no issue with the incorrect pairing of heavy and light chains (e.g., heavy 1 pairing with light 2, etc.).

[0593] In some embodiments of the 1+1 Fab-scFv-Fc format antibody, one of the first or second antigen binding domain is a CD28 binding domain and the other binding domain is a CEACAM5 binding domain. In some embodiments where the 1+1 Fab-scFv-Fc, it is the scFv that binds to the CD28, and the Fab that binds CEACAM5. Exemplary anti-CD28 x anti-CEACAM5 bispecific antibodies in the 1+1 Fab-scFv-Fc format are depicted in FIG. 24.

[0594] In some embodiments, the first and second Fc domains of the 1+1 Fab-scFv-Fc format antibody are variant Fc domains that include heterodimerization skew variants (e.g., a set of amino acid substitutions as shown in FIGS. 3 and 8). Particularly useful heterodimerization skew variants include S364K/E357Q: L368D/K370S; L368D/K370S: S364K; L368E/K370S: S364K; T411T/E360E/Q362E: D401K; L368D/K370S: S364K/E357L; K370S: S364K/E357Q; T366S/L368A/Y407V: T366W and T366S/L368A/Y407V/Y349C: T366W/S354C (EU numbering)). In exemplary embodiments, one of the first or second variant Fc domains includes heterodimerization skew variants L368D/K370S and the other of the first or second variant Fc domains includes heterodimerization skew variants S364K/E357Q, wherein numbering is according to EU numbering. In exemplary embodiments, the first variant Fc domain includes heterodimerization skew variants L368D/K370S and the second variant Fc domain includes heterodimerization skew variants S364K/E357Q, wherein numbering is according to EU numbering.

[0595] In some embodiments, the variant Fc domains include ablation variants (including those shown in FIG. 5). In some embodiments, each of the first and second variant Fc domains include ablation variants E233P/L234V/L235A/G236_/S267K, wherein numbering is according to EU numbering.

[0596] In some embodiments, the constant domain (CH1-hinge-CH2-CH3) of the first monomer includes pI variants (including those shown in FIGS. 3 and 4). In exemplary embodiments, the constant domain (CH1-hinge-CH2-CH3) of the first monomer includes pI variants N208D/Q295E/N384D/Q418E/N421D, wherein numbering is according to EU numbering.

[0597] In exemplary embodiments, the 1+1 Fab-scFv-Fc format antibody includes a combination of amino acid modifications as depicted in FIG. 8. In such embodiments, the CH1-hinge-CH2-CH3 of the first monomer comprises amino acid variants L368D/K370S/N208D/Q295E/N384D/Q418E/N421D/E233P/L234V/L235A/G236del/S267 K, the second Fc domain comprises amino acid variants S364K/E357Q/E233P/L234V/L235A/G236del/S267K, wherein numbering is according to EU numbering.

[0598] In some embodiments, the scFv of the 1+1 Fab-scFv-Fc format antibody provided herein includes a charged scFv linker (including those shown in FIG. 6). In some embodiments, the 1+1 Fab-scFv-Fc format antibody provided herein includes FcRn variants M428L/N434S, wherein numbering is according to EU numbering.

[0599] In exemplary embodiments 1+1 Fab-scFv-Fc format antibody, the first Fc domain includes heterodimerization skew variants L368D/K370S and the second Fc domain includes heterodimerization skew variants S364K/E357Q; each of the first and second Fc domains include ablation variants E233P/L234V/L235A/G236_/S267K; and the constant domain (CH1-hinge-CH2-CH3) of the first monomer includes pI variants N208D/Q295E/N384D/Q418E/N421D, wherein numbering is according to EU numbering. In some embodiments, the scFv of the 1+1 Fab-scFv-Fc format antibody provided herein includes a (GKPGS)₄ charged scFv linker (SEQ ID NO: 24). In some embodiments, the 1+1 Fab-scFv-Fc format antibody provided herein includes FcRn variants M428L/N434S, wherein numbering is according to EU numbering. In some embodiments, the scFv of the 1+1 Fab-scFv-Fc format antibody provided herein includes a charged scFv linker (including those shown in FIG. 6).

[0600] Any suitable CD28 binding domain can be included in subject 1+1 Fab-scFv-Fc format antibody, including any of the CD28 binding domains provided herein. In some embodiments, the CD28 binding domain is one of the following CD28 binding domains or a variant thereof: 1A7[CD28]_H1L1, 1A7[CD28]_H1.1_L1, 1A7[CD28]_H1_L1.71, 1A7[CD28]_H1.1_L1.71, 1A7[CD28]H1.14_L1, IA7[CD28]_H1.14_L1.71, CD28.3[CD28]_H0L0, hCD28.3[CD28]_H1L1, 5.11A1[CD28]_H0L0, TGN1412_H1L1, 341VL34[CD28]H1L1, 341VL36[CD28]_H1L1, 281VL4[CD28]_H1L1, HuTN228[CD28]_H1L1, PV1[CD28]H0L0, m9.3[CD28]_H0L0, hu9.3[CD28]_H1L1, 9G2[CD28]_H0L0, 9G2[CD28]_H1L1, 2F10A3.140[CD28]_H1L1, TN228[CD28]_H4L2, IA7[CD28]_H1.1_L1 [S-S], IA7[CD28]_H1_L1.71 [S-S], IA7[CD28]_H1.1_L1.71 [S-S], IA7[CD28]_H1.14_L1 [S-S], IA7[CD28]_H1.14_L1.71 [S-S], IA7[CD28]_H1.129_L1.71 [S-S], 1A7[CD28]_H1.106_L1.71 [S-S], 1A7[CD28]_H1.129_L1 [S-S], and IA7[CD28]_H1.106_L1 [S-S](FIGS. 15, 18, 21 and 65). Additional VH and VL sequences of exemplary CD28 binding domains that can be used in the subject 1+1 Fab-scFv-Fc format antibody are depicted in FIGS. 15, 16, 17, and 82.

[0601] In some embodiments of the 1+1 Fab-scFv-Fc format, the anti-CD28 ABD has a VH and VL domain selected from the following:
[0602] (i) a VH comprising a vhCDR1, a vhCDR2, and a vhCDR3 having an amino acid sequence of a vhCDR1, a vhCDR2, and a vhCDR3, respectively, of a VH of any of the CD28 binding domains depicted in FIGS. 15, 18, 21 and 65 or a variant thereof; and (ii) a VL comprising a vlCDR1, a vlCDR2, and a vlCDR3 having an amino acid sequence of a vlCDR1, a vlCDR2, and a vlCDR3, respectively, of the VL of the CD28 binding domain depicted in FIGS. 15, 18, 21 and 65 or a variant thereof; or
[0603] (i) a VH comprising a vhCDR1, a vhCDR2, and a vhCDR3 having an amino acid sequence of a vhCDR1, a vhCDR2, and a vhCDR3, respectively, of a VH depicted in FIG. 15 or 16 or a variant thereof; and (ii) a VL comprising a vlCDR1, a vlCDR2, and a vlCDR3 having an amino acid sequence of a vlCDR1, a vlCDR2, and a vlCDR3, respectively, of a VL depicted in FIG. 15, 17, or 82 or a variant thereof.

[0604] In some embodiments of the 1+1 Fab-scFv-Fc format, the anti-CD28 ABD has a VH and VL domain selected from the following:
[0605] (i) a VH having an amino acid sequence of a VH of any of the CD28 binding domains depicted in FIGS. 15, 18, 21 and 65 or a variant thereof; and (ii) a VL having an amino acid sequence of the VL of the CD28 binding domain depicted in FIGS. 15, 18, 21 and 65 or a variant thereof; or
[0606] (i) a VH having an amino acid sequence of a VH depicted in FIG. 15 or 16 or a variant thereof; and (ii) a VL having an amino acid sequence of the VL of a VL depicted in FIG. 15, 17, or 82 or a variant thereof.

[0607] Any suitable CEACAM5 binding domain can be included in subject 1+1 Fab-scFv-Fc format antibody, including any of the CEACAM5 binding domains provided herein. Exemplary CEACAM5 binding domains that can be used in the subject 1+1 Fab-scFv-Fc format antibody are depicted in FIG. 41 and FIG. 45.

[0608] In some embodiments of the 1+1 Fab-scFv-Fc format, the CEACAM5 ABD has (i) a VH having an amino acid sequence of a VH of any one of the CEACAM5 binding domains depicted in FIG. 41 and FIG. 45 or a variant thereof; and (ii) a VL having an amino acid sequence of the VL of the CEACAM5 binding domain depicted in FIG. 41 and FIG. 45 or a variant thereof.

[0609] FIG. 9 shows some exemplary Fc domain sequences that are useful in the 1 +1 Fab-scFv-Fc format antibodies. The “monomer 1” sequences depicted in FIG. 9 typically refer to the Fc domain of the “Fab-Fc heavy chain” and the “monomer 2” sequences refer to the Fc domain of the “scFv-Fc heavy chain.” In addition, FIGS. 11 and 12 provide exemplary CH1-hinge domains, CH1 domains, and hinge domains that can be included in the first or second monomer of the 1+1 Fab-scFv-Fc format. Further, FIG. 13 provides useful CL sequences that can be used with this format.

2. 2+1 mAb-scFv Format

[0610] One heterodimeric antibody format that finds particular use in the subject bispecific anti-CD28 x anti-CEACAM5 antibodies is the 2+1 mAb-scFv format shown in FIG. 14E. This antibody format includes three antigen binding domains: two Fab portions and an scFv that is attached to the C-terminal of one of the heavy chains. In some embodiments of this format, the Fab portions each bind CEACAM5, in this case, human CEACAM5 and the “extra” scFv domain binds CD28. That is, this mAb-scFv format is a trivalent antibody.

[0611] In these embodiments, the first chain or monomer comprises, from N- to C-terminal, VH1-CHT-hinge-CH2-CH3, the second monomer comprises, from N- to C-terminal, VH1-CHT-hinge-CH2-CH3-domain linker-scFv domain, where the scFv domain comprises a second VH (VH2), a second VL (VL2) and a scFv linker. As for all the scFv domains herein, the scFv domain can be in either orientation, from N- to C-terminal, VH2-scFv linker-VL2 or VL2-scFv linker-VH2. Accordingly, the second monomer may comprise, from N- to C-terminal, VH1-CH1-hinge-CH2-CH3-domain linker-VH2-scFv linker-VL2 or VH1-CH1-hinge-CH2-CH3-domain linker-VL2-scFv linker-VH2. The composition also comprises a light chain, VL1-CL. In embodiments, this format includes two identical light chains (VL1-CL). In this format, the VHTs are each a first variable heavy (VH) domain, the VLTs are each a first variable light (VL) domain, the VH2 is a second variable heavy domain, and the VL2 is a second variable light domain. In some embodiments, the format includes two identical common light chains (each VL1-CL), wherein each of the common light chains associates with one of the VH1-CHT of the first and second monomers to form two identical Fabs (i.e., first antigen binding domains). In some embodiments, the scFv is the second antigen binding domain. In some embodiments, the first ABDs bind to human CEACAM5, and the second ABD binds human CD28.

[0612] In some embodiments, the first and second Fc domains of the 2+1 mAb-scFv format antibody are variant Fc domains that include heterodimerization skew variants (e.g., a set of amino acid substitutions as shown in FIGS. 3 and 8). Particularly useful heterodimerization skew variants include S364K/E357Q: L368D/K370S; L368D/K370S: S364K; L368E/K370S: S364K; T411T/E360E/Q362E: D401K; L368D/K370S: S364K/E357L; K370S: S364K/E357Q; T366S/L368A/Y407V: T366W and T366S/L368A/Y407V/Y349C: T366W/S354C (EU numbering)). In exemplary embodiments, one of the first or second variant Fc domains includes heterodimerization skew variants L368D/K370S and the other of the first or second variant Fc domains includes heterodimerization skew variants S364K/E357Q, wherein numbering is according to EU numbering. In exemplary embodiments, the first variant Fc domain includes heterodimerization skew variants L368D/K370S and the second variant Fc domain includes heterodimerization skew variants S364K/E357Q, wherein numbering is according to EU numbering.

[0613] In some embodiments, the variant Fc domains include ablation variants (including those shown in FIG. 5). In some embodiments, each of the first and second variant Fc domains include ablation variants E233P/L234V/L235A/G236_/S267K, wherein numbering is according to EU numbering.

[0614] In some embodiments, the constant domain (CH1-hinge-CH2-CH3) of the first monomer includes pI variants (including those shown in FIGS. 3 and 4). In exemplary embodiments, the constant domain (CH1-hinge-CH2-CH3) of the first monomer includes pI variants N208D/Q295E/N384D/Q418E/N421D, wherein numbering is according to EU numbering.

[0615] In some embodiments, the scFv of the 2+1 mAb-scFv format antibody provided herein includes a charged scFv linker (including those shown in FIG. 6). In some embodiments, the 2+1 mAb-scFv format antibody provided herein includes FcRn variants M428L/N434S, wherein numbering is according to EU numbering.

[0616] In exemplary embodiments the 2+1 mAb-scFv format antibody includes a combination of amino acid modifications as depicted in FIG. 8. In such embodiments, the first variant Fc domain includes heterodimerization skew variants L368D/K370S and the second variant Fc domain includes heterodimerization skew variants S364K/E357Q; each of the first and second variant Fc domains include ablation variants E233P/L234V/L235A/G236_/S267K; and the constant domain (CH1-hinge-CH2-CH3) of the first monomer includes pI variants N208D/Q295E/N384D/Q418E/N421D, wherein numbering is according to EU numbering. In some embodiments, the scFv of the 2+1 mAb-scFv format antibody provided herein includes a (GKPGS)₄ charged scFv linker (SEQ ID NO: 24). In some embodiments, 2+1 mAb-scFv format antibody provided herein includes FcRn variants M428L/N434S, wherein numbering is according to EU numbering.

[0617] In some embodiments, the scFv of the second monomer of the 2+1 Fab2-scFv-Fc format antibody is a CD28 binding and the VH1 of the first and second monomer and the VL1 of the common light chain each form binding domains that bind CEACAM5. Any suitable CEACAM5 binding domain and CD28 binding domain can be included in the 2 +1 mAb-scFv format antibody, including any of the CEACAM5 binding domains and CD28 binding domains and related VHs and VLs provided herein or a variant thereof (see, e.g., FIGS. 15-18, 21 and 48).

[0618] In some embodiments of the 2+1 mAb-scFv format, the anti-CD28 ABD has a VH and VL domain selected from the following:
[0619] (i) a VH comprising a vhCDR1, a vhCDR2, and a vhCDR3 having an amino acid sequence of a vhCDR1, a vhCDR2, and a vhCDR3, respectively, of a VH of any of the CD28 binding domains depicted in FIGS. 15, 18, 21 and 65 or a variant thereof; and (ii) a VL comprising a vlCDR1, a vlCDR2, and a vlCDR3 having an amino acid sequence of a vlCDR1, a vlCDR2, and a vlCDR3, respectively, of the VL of the CD28 binding domain depicted in FIGS. 15, 18, 21 and 65 or a variant thereof; or
[0620] (i) a VH comprising a vhCDR1, a vhCDR2, and a vhCDR3 having an amino acid sequence of a vhCDR1, a vhCDR2, and a vhCDR3, respectively, of a VH depicted in FIG. 15 or 16 or a variant thereof; and (ii) a VL comprising a vlCDR1, a vlCDR2, and a vlCDR3 having an amino acid sequence of a vlCDR1, a vlCDR2, and a vlCDR3, respectively, of a VL depicted in FIG. 15, 17, or 82 or a variant thereof.

[0621] In some embodiments of the 2+1 mAb-scFv format, the anti-CD28 ABD has a VH and VL domain selected from the following:
[0622] (i) a VH having an amino acid sequence of a VH of any of the CD28 binding domains depicted in FIGS. 15, 18, 21 and 65 or a variant thereof; and (ii) a VL having an amino acid sequence of the VL of the CD28 binding domain depicted in FIGS. 15, 18, 21 and 65 or a variant thereof; or
[0623] (i) a VH having an amino acid sequence of a VH depicted in FIG. 15 or 16 or a variant thereof; and (ii) a VL having an amino acid sequence of the VL of a VL depicted in FIG. 15, 17, or 82 or a variant thereof.

[0624] In some embodiments of the 2+1 mAb-scFv format, each of the CEACAM5 ABDs has (i) a VH having an amino acid sequence of a VH of any one of the CEACAM5 binding domains depicted in FIG. 41 and FIG. 45 or a variant thereof; and (ii) a VL having an amino acid sequence of the VL of the CEACAM5 binding domain depicted in FIG. 41 and FIG. 45 or a variant thereof.

[0625] FIG. 10 shows some exemplary Fc domain sequences that are useful in the 2+1 mAb-scFv format antibodies. In addition, FIGS. 11 and 12 provide exemplary CH1-hinge domains, CH1 domains, and hinge domains that can be included in the first or second monomer of the 2+1 mAb-scFv format. Further, FIG. 13 provides useful CL sequences that can be used with this format.

3. 2+1 Fab2-scFv-Fc format

[0626] One heterodimeric antibody format that finds particular use in subject anti-CD28 x anti-CEACAM5 antibodies provided herein is the 2+1 Fab2-scFv-Fc format (also referred to as “central-scFv format”) shown in FIG. 14B. This antibody format includes three antigen binding domains: two Fab portions and an scFv that is inserted between the VH-CH1 and CH2-CH3 regions of one of the monomers. In some embodiments of this format, the Fab portions each bind CEACAM5 and the “extra” scFv domain binds CD28. In some embodiments, the 2+1 Fab2-scFv-Fc format antibody is a trivalent antibody.

[0627] In some embodiments of the 2+1 Fab2-scFv-Fc format, a first monomer includes a standard heavy chain (i.e., VH1-CHT-hinge-CH2-CH3), wherein VH1 is a first variable heavy domain and CH2-CH3 is a first Fc domain. A second monomer includes another first variable heavy domain (VH1), a CH1 domain (and optional hinge), a second Fc domain, and an scFv that includes an scFv variable light domain (VL2), an scFv linker and a scFv variable heavy domain (VH2). The scFv is covalently attached between the C-terminus of the CH1 domain of the second monomer and the N-terminus of the second Fc domain using optional domain linkers (VHT-CHT-[optional linker]-VH2-scFv linker-VH2-[optional linker]-CH2-CH3, or the opposite orientation for the scFv, VH1-CHT-[optional linker]-VL2-scFv linker-VH2-[optional linker]-CH2-CH3). The optional linkers can be any suitable peptide linkers, including, for example, the domain linkers included in FIG. 7. This embodiment further utilizes a common light chain that includes a variable light domain (VL1) and a constant light domain (CL). In some embodiments, the format includes two identical common light chains (each VL1-CL), wherein each of the common light chains associates with one of the VH1-CHT of the first and second monomers to form two identical Fabs. In some embodiments, the identical Fabs each bind CEACAM5, and the scFv binds CD28. As for many of the embodiments herein, these constructs can include skew variants, pI variants, ablation variants, additional Fc variants, etc. as desired and described herein.

[0628] In some embodiments, the first and second Fc domains of the 2+1 Fab2-scFv-Fc format antibody are variant Fc domains that include heterodimerization skew variants (e.g., a set of amino acid substitutions as shown in FIGS. 3 and 8). Particularly useful heterodimerization skew variants include S364K/E357Q: L368D/K370S; L368D/K370S: S364K; L368E/K370S: S364K; T411T/E360E/Q362E: D401K; L368D/K370S: S364K/E357L; K370S: S364K/E357Q; T366S/L368A/Y407V: T366W and T366S/L368A/Y407V/Y349C: T366W/S354C (EU numbering)). In exemplary embodiments, one of the first or second variant Fc domains includes heterodimerization skew variants L368D/K370S and the other of the first or second variant Fc domains includes heterodimerization skew variants S364K/E357Q, wherein numbering is according to EU numbering. In exemplary embodiments, the first variant Fc domain includes heterodimerization skew variants L368D/K370S and the second variant Fc domain includes heterodimerization skew variants S364K/E357Q, wherein numbering is according to EU numbering.

[0629] In some embodiments, the variant Fc domains include ablation variants (including those shown in FIG. 5). In some embodiments, each of the first and second variant Fc domains include ablation variants E233P/L234V/L235A/G236_/S267K, wherein numbering is according to EU numbering.

[0630] In some embodiments, the constant domain (CH1-hinge-CH2-CH3) of the first monomer includes pI variants (including those shown in FIGS. 3 and 4). In exemplary embodiments, the constant domain (CH1-hinge-CH2-CH3) of the first monomer includes pI variants N208D/Q295E/N384D/Q418E/N421D, wherein numbering is according to EU numbering.

[0631] In some embodiments, the scFv of the 2+1 Fab2-scFv-Fc format antibody provided herein includes a charged scFv linker (including those shown in FIG. 6). In some embodiments, the 2+1 Fab2-scFv-Fc format antibody provided herein includes FcRn variants M428L/N434S, wherein numbering is according to EU numbering.

[0632] In exemplary embodiments 2+1 Fab2-scFv-Fc format antibody includes a combination of amino acid modifications as depicted in FIG. 8. In such embodiments, the first variant Fc domain includes heterodimerization skew variants L368D/K370S and the second variant Fc domain includes heterodimerization skew variants S364K/E357Q; each of the first and second variant Fc domains include ablation variants E233P/L234V/L235A/G236_/S267K; and the constant domain (CHT-hinge-CH2-CH3) of the first monomer includes pI variants N208D/Q295E/N384D/Q418E/N421D, wherein numbering is according to EU numbering. In some embodiments, the scFv of the 2+1 Fab2-scFv-Fc format antibody provided herein includes a (GKPGS)₄ charged scFv linker (SEQ ID NO: 24). In some embodiments, the 2+1 Fab2-scFv-Fc format antibody provided herein includes FcRn variants M428L/N434S, wherein numbering is according to EU numbering.

[0633] In some embodiments, the CH1-hinge-CH2-CH3 of the first monomer comprises amino acid variants L368D/K370S/N208D/Q295E/N384D/Q418E/N421D/E233P/L234V/L235A/G236del/S267 K, and the second Fc domain comprises amino acid variants S364K/E357Q/E233P/L234V/L235A/G236del/S267K, wherein numbering is according to EU numbering.

[0634] In some embodiments, the scFv of the second monomer of the 2+1 Fab2-scFv-Fc format antibody is a CD28 binding and the VH1 of the first and second monomer and the VL1 of the common light chain each form binding domains that bind CEACAM5.

[0635] Any suitable CD28 binding domain can be included in subject 2+1 Fab2-scFv-Fc format antibody, including any of the CD28 binding domains provided herein. In some embodiments, the CD28 binding domain is one of the following CD28 binding domains or a variant thereof 1A7[CD28]_H1L1, 1A7[CD28]_H1.1_L1, 1A7[CD28]_H1_L1.71, 1A7[CD28]_H1.1_L1.71, 1A7[CD28]H1.14_L1, 1A7[CD28]_H1.14_L1.71, CD28.3[CD28]_H0L0, hCD28.3[CD28]_H1L1, 5.11A1[CD28]_H0L0, TGN1412_H1L1, 341VL34[CD28]H1L1, 341VL36[CD28]_H1L1, 281VL4[CD28]_H1L1, HuTN228[CD28]_H1L1, PV1[CD28]H0L0, m9.3[CD28]_H0L0, hu9.3[CD28]_H1L1, 9G2[CD28]_H0L0, 9G2[CD28]_H1L1, 2F10A3.140[CD28]_H1L1, TN228[CD28]_H4L2, IA7[CD28]_H1.1_L1 [S-S], IA7[CD28]_H1_L1.71 [S-S], IA7[CD28]_H1.1_L1.71 [S-S], IA7[CD28]_H1.14_L1 [S-S], IA7[CD28]_H1.14_L1.71 [S-S], IA7[CD28]_H1.129_L1.71 [S-S], 1A7[CD28]_H1.106_L1.71 [S-S], 1A7[CD28]_H1.129_L1 [S-S], and 1A7[CD28]_H1.106_L1 [S-S](FIGS. 15, 18, 21 and 65).

[0636] In some embodiments of the 2+1 Fab2-scFv-Fc format, the anti-CD28 ABD has a VH and VL domain selected from the following:
[0637] (i) a VH comprising a vhCDR1, a vhCDR2, and a vhCDR3 having an amino acid sequence of a vhCDR1, a vhCDR2, and a vhCDR3, respectively, of a VH of any of the CD28 binding domains depicted in FIGS. 15, 18, 21 and 65 or a variant thereof; and (ii) a VL comprising a vlCDR1, a vlCDR2, and a vlCDR3 having an amino acid sequence of a vlCDR1, a vlCDR2, and a vlCDR3, respectively, of the VL of the CD28 binding domain depicted in FIGS. 15, 18, 21 and 65 or a variant thereof; or
[0638] (i) a VH comprising a vhCDR1, a vhCDR2, and a vhCDR3 having an amino acid sequence of a vhCDR1, a vhCDR2, and a vhCDR3, respectively, of a VH depicted in FIG. 15 or 16 or a variant thereof; and (ii) a VL comprising a vlCDR1, a vlCDR2, and a vlCDR3 having an amino acid sequence of a vlCDR1, a vlCDR2, and a vlCDR3, respectively, of a VL depicted in FIG. 15, 17, or 82 or a variant thereof.

[0639] In some embodiments of the 2+1 Fab2-scFv-Fc format, the anti-CD28 ABD has a VH and VL domain selected from the following:
[0640] (i) a VH having an amino acid sequence of a VH of any of the CD28 binding domains depicted in FIGS. 15, 18, 21 and 65 or a variant thereof; and (ii) a VL having an amino acid sequence of the VL of the CD28 binding domain depicted in FIGS. 15, 18, 21 and 65 or a variant thereof; or
[0641] (i) a VH having an amino acid sequence of a VH depicted in FIG. 15 or 16 or a variant thereof; and (ii) a VL having an amino acid sequence of the VL of a VL depicted in FIG. 15, 17, or 82 or a variant thereof.

[0642] In some embodiments, the VH1 of the first and second monomer and the VL1 of the common light chain of the 2+1 Fab2-scFv-Fc format antibody each form a binding domain that binds CEACAM5. Any suitable CEACAM5 binding domain can be included in subject 2+1 Fab2-scFv-Fc format antibody, including any of the CEACAM5 binding domains provided herein. Exemplary CEACAM5 binding domains that can be used in the subject 2+1 Fab2-scFv-Fc format antibody are depicted in FIG. 41 and FIG. 45.

[0643] In some embodiments of 2+1 Fab2-scFv-Fc format, the CEACAM5 ABDs each include (i) a VH having an amino acid sequence of a VH of any one of the CEACAM5 binding domains depicted in FIG. 41 and FIG. 45 or a variant thereof; and (ii) a VL having an amino acid sequence of the VL of the CEACAM5 binding domain depicted in FIG. 41 and FIG. 45 or a variant thereof.

[0644] FIG. 9 shows some exemplary Fc domain sequences that are useful in the 2 +1 Fab2-scFv-Fc format antibodies. In addition, FIGS. 11 and 12 provide exemplary CH1-hinge domains, CH1 domains, and hinge domains that can be included in the first or second monomer of the 2+1 Fab2-scFv-Fc format. Further, FIG. 13 provides useful CL sequences that can be used with this format.

4. 2+1 Fab2-Fc x scFv-Fc format

[0645] One heterodimeric antibody format that finds particular use in the subject anti-anti-CD28 x anti-CEACAM5 antibodies provided herein is the 2+1 Fab2-Fc x scFv-Fc format (also referred to as “stacked bottle opener”) shown in FIG. 14F. This format includes a first monomer, a second monomer and a common light chain. The first monomer includes, from N- to C-terminus: a VH1-CH1-domain linker-VH1-CH1-hinge-CH2-CH3, wherein the VHls are each a first variable heavy domain and the CH2-CH3 is a first variant Fc domain.

[0646] The domain linker can be any useful domain linker (see, e.g., FIG. 7). The second monomer includes a single-chain Fv (“scFv”) covalently attached to a second variant Fc domain by a domain linker (scFv-domain linker-CH2-CH3). The common light chain include a VL1-CL wherein the VL1 is a first variable light domain. The scFv of the second monomer includes a second variable heavy domain (VH2) attached to a second variable light domain (VL2) by an scFv linker. In some embodiments, this format includes two identical common light chains (VL1-CL). In this embodiment, the two VH1-CHTs of the first monomer each interact with a common light chain to form two identical Fabs that are first antigen binding domains, and the VH2 and VL2 form a second antigen binding domain. In some embodiments, each of the first antigen binding domains are CEACAM5 binding domains, and the second antigen binding domain is a CD28 binding domain. As for many of the embodiments herein, these constructs can include skew variants, pI variants, ablation variants, additional Fc variants, etc. as desired and described herein.

[0647] In some embodiments, the first and second Fe domains of the 2+1 Fab2-Fc x scFv-Fc format antibody are variant Fe domains that include heterodimerization skew variants (e.g., a set of amino acid substitutions as shown in FIGS. 3 and 8). Particularly useful heterodimerization skew variants include S364K/E357Q: L368D/K370S; L368D/K370S: S364K; L368E/K370S: S364K; T411T/E360E/Q362E: D401K; L368D/K370S: S364K/E357L; K370S: S364K/E357Q; T366S/L368A/Y407V: T366W and T366S/L368A/Y407V/Y349C: T366W/S354C (EU numbering)). In exemplary embodiments, one of the first or second variant Fc domains includes heterodimerization skew variants L368D/K370S and the other of the first or second variant Fc domains includes heterodimerization skew variants S364K/E357Q, wherein numbering is according to EU numbering. In exemplary embodiments, the first variant Fc domain includes heterodimerization skew variants L368D/K370S and the second variant Fc domain includes heterodimerization skew variants S364K/E357Q, wherein numbering is according to EU numbering.

[0648] In some embodiments, the variant Fc domains include ablation variants (including those shown in FIG. 5). In some embodiments, each of the first and second variant Fc domains include ablation variants E233P/L234V/L235A/G236_/S267K, wherein numbering is according to EU numbering.

[0649] In some embodiments, the constant domain (CH1-hinge-CH2-CH3) of the first monomer includes pI variants (including those shown in FIGS. 3 and 4). In exemplary embodiments, the constant domain (CH1-hinge-CH2-CH3) of the first monomer includes pI variants N208D/Q295E/N384D/Q418E/N421D, wherein numbering is according to EU numbering.

[0650] In some embodiments, the 2+1 Fab2-Fc x scFv-Fc format antibody provided herein includes a charged scFv linker (including those shown in FIG. 6). In some embodiments, the 2+1 Fab2-scFv-Fc format antibody provided herein includes FcRn variants M428L/N434S, wherein numbering is according to EU numbering.

[0651] In exemplary embodiments, the 2+1 Fab2-Fc x scFv-Fc format antibody includes a combination of amino acid modifications as depicted in FIG. 8. In such embodiments, the first variant Fc domain includes heterodimerization skew variants L368D/K370S and the second variant Fc domain includes heterodimerization skew variants S364K/E357Q; each of the first and second variant Fc domains include ablation variants E233P/L234V/L235A/G236_/S267K; and the constant domain (CH1-hinge-CH2-CH3) of the first monomer includes pI variants N208D/Q295E/N384D/Q418E/N421D, wherein numbering is according to EU numbering. In some embodiments, the scFv of the 2+1 Fab2-scFv-Fc format antibody provided herein includes a (GKPGS)₄ charged scFv linker (SEQ ID NO:24). In some embodiments, the 2+1 Fab2-scFv-Fc format antibody provided herein includes FcRn variants M428L/N434S, wherein numbering is according to EU numbering.

[0652] In some embodiments, the CH1-hinge-CH2-CH3 of the first monomer comprises amino acid variants L368D/K370S/N208D/Q295E/N384D/Q418E/N421D/E233P/L234V/L235A/G236del/S267 K, and the second Fc domain comprises amino acid variants S364K/E357Q/E233P/L234V/L235A/G236del/S267K, wherein numbering is according to EU numbering.

[0653] In some embodiments, the scFv of the second monomer of the 2+1 Fab2-Fc x scFv-Fc format antibody is a CD28 binding and the VH1 of the first and second monomer and the VL1 of the common light chain each form binding domains that bind CEACAM5.

[0654] Any suitable CD28 binding domain can be included in subject 2+1 Fab2-scFv-Fc format antibody, including any of the CD28 binding domains provided herein. In some embodiments, the CD28 binding domain is one of the following CD28 binding domains or a variant thereof: 1A7[CD28]_H1L1, 1A7[CD28]_H1.1_L1, 1A7[CD28]_H1_L1.71, 1A7[CD28]_H1.1_L1.71, 1A7[CD28]H1.14_L1, IA7[CD28]_H1.14_L1.71, CD28.3[CD28]_H0L0, hCD28.3[CD28]_H1L1, 5.11A1[CD28]_H0L0, TGN1412_H1L1, 341VL34[CD28]H1L1, 341VL36[CD28]_H1L1, 281VL4[CD28]_H1L1, HuTN228[CD28]_H1L1, PV1[CD28]H0L0, m9.3[CD28]_H0L0, hu9.3[CD28]_H1L1, 9G2[CD28]_H0L0, 9G2[CD28]_H1L1, 2F10A3.140[CD28]_H1L1, TN228[CD28]_H4L2, IA7[CD28]_H1.1_L1 [S-S], IA7[CD28]_H1_L1.71 [S-S], IA7[CD28]_H1.1_L1.71 [S-S], IA7[CD28]_H1.14_L1 [S-S], IA7[CD28]_H1.14_L1.71 [S-S], IA7[CD28]_H1.129_L1.71 [S-S], 1A7[CD28]_H1.106_L1.71 [S-S], 1A7[CD28]_H1.129_L1 [S-S], and 1A7[CD28]_H1.106_L1 [S-S](FIGS. 15, 18, 21 and 65).

[0655] In some embodiments of the 2+1 Fab2-Fc x scFv-Fc format, the anti-CD28 ABD has a VH and VL domain selected from the following:
[0656] (i) a VH comprising a vhCDR1, a vhCDR2, and a vhCDR3 having an amino acid sequence of a vhCDR1, a vhCDR2, and a vhCDR3, respectively, of a VH of any of the CD28 binding domains depicted in FIGS. 15, 18, 21 and 65 or a variant thereof; and (ii) a VL comprising a vlCDR1, a vlCDR2, and a vlCDR3 having an amino acid sequence of a vlCDR1, a vlCDR2, and a vlCDR3, respectively, of the VL of the CD28 binding domain depicted in FIGS. 15, 18, 21 and 65 or a variant thereof; or
[0657] (i) a VH comprising a vhCDR1, a vhCDR2, and a vhCDR3 having an amino acid sequence of a vhCDR1, a vhCDR2, and a vhCDR3, respectively, of a VH depicted in FIG. 15 or 16 or a variant thereof; and (ii) a VL comprising a vlCDR1, a vlCDR2, and a vlCDR3 having an amino acid sequence of a vlCDR1, a vlCDR2, and a vlCDR3, respectively, of a VL depicted in FIG. 15, 17, or 82 or a variant thereof.

[0658] In some embodiments of the 2+1 Fab2-Fc x scFv-Fc, the anti-CD28 ABD has a VH and VL domain selected from the following:
[0659] (i) a VH having an amino acid sequence of a VH of any of the CD28 binding domains depicted in FIGS. 15, 18, 21 and 65 or a variant thereof; and (ii) a VL having an amino acid sequence of the VL of the CD28 binding domain depicted in FIGS. 15, 18, 21 and 65 or a variant thereof; or
[0660] (i) a VH having an amino acid sequence of a VH depicted in FIG. 15 or 16 or a variant thereof; and (ii) a VL having an amino acid sequence of the VL of a VL depicted in FIG. 15, 17, or 82 or a variant thereof.

[0661] In some embodiments, the VH1 of the first and second monomer and the VL1 of the common light chain of the 2+1 Fab2-Fc x scFv-Fc format antibody each form a binding domain that binds CEACAM5. Any suitable CEACAM5 binding domain can be included in subject 2+1 Fab2-Fc x scFv-Fc format antibody, including any of the CEACAM5 binding domains provided herein. Exemplary CEACAM5 binding domains that can be used in the subject 2+1 Fab2-Fc x scFv-Fc format antibody are depicted in FIG. 41 and FIG. 45.

[0662] In some embodiments of 2+1 Fab2-Fc x scFv-Fc format, the CEACAM5 ABDs each include (i) a VH having an amino acid sequence of a VH of any one of the CEACAM5 binding domains depicted in FIG. 41 and FIG. 45 or a variant thereof.

[0663] FIG. 9 shows some exemplary Fc domain sequences that are useful in 2+1 Fab2-Fc x scFv-Fc format antibodies. In addition, FIGS. 11 and 12 provide exemplary CH1-hinge domains, CH1 domains, and hinge domains that can be included in the first or second monomer of the 2+1 Fab2-Fc x scFv-Fc format. Further, FIG. 13 provides useful CL sequences that can be used with this format. 5. 1+1 CLC Format

[0664] One heterodimeric antibody format that finds particular use in subject anti-CD28 x anti-CEACAM5 antibodies provided herein is the “1+1 Common Light Chain” or “1+1 CLC” format, which is depicted in FIG. 14C. The 1+1 CLC format antibody includes a first monomer that includes a VH1-CHT-hinge-CH2-CH3, wherein VH1 is a first variable heavy domain and CH2-CH3 is a first Fc domain; a second monomer that includes a VH2-CH1-hinge-CH2-CH3, wherein VH2 is a second variable heavy domain and CH2-C3 is a second Fc domain; and a third monomer “common light chain” comprising VL-CL, wherein VL is a common variable light domain and CL is a constant light domain. In such embodiments, the VL pairs with the VH1 to form a first binding domain with a first antigen binding specificity; and the VL pairs with the VH2 to form a second binding domain with a second antigen binding specificity. In some embodiments, the 1+1 CLC format antibody is a bivalent antibody.

[0665] In some embodiments, the first and second Fc domains of the 1+1 CLC format are variant Fc domains that include heterodimerization skew variants (e.g., a set of amino acid substitutions as shown in FIGS. 3 and 8). Particularly useful heterodimerization skew variants include S364K/E357Q: L368D/K370S; L368D/K370S: S364K; L368E/K370S: S364K; T411T/E360E/Q362E: D401K; L368D/K370S: S364K/E357L; K370S: S364K/E357Q; T366S/L368A/Y407V: T366W and T366S/L368A/Y407V/Y349C: T366W/S354C (EU numbering). In exemplary embodiments, one of the first or second variant Fc domains includes heterodimerization skew variants L368D/K370S and the other of the first or second variant Fc domains includes heterodimerization skew variants S364K/E357Q, wherein numbering is according to EU numbering. In exemplary embodiments, the first variant Fc domain includes heterodimerization skew variants L368D/K370S and the second variant Fc domain includes heterodimerization skew variants S364K/E357Q, wherein numbering is according to EU numbering.

[0666] In some embodiments, the variant Fc domains include ablation variants (including those shown in FIG. 5). In some embodiments, each of the first and second variant Fc domains include ablation variants E233P/L234V/L235A/G236_/S267K, wherein numbering is according to EU numbering.

[0667] In some embodiments, the constant domain (CH1-hinge-CH2-CH3) of the first or second monomer includes pI variants (including those shown in FIGS. 3 and 4). In exemplary embodiments, the constant domain (CH1-hinge-CH2-CH3) of the first or second monomer includes pI variants N208D/Q295E/N384D/Q418E/N421D, wherein numbering is according to EU numbering.

[0668] In some embodiments, the 1+1 CLC format antibody provided herein includes FcRn variants M428L/N434S, wherein numbering is according to EU numbering.

[0669] In exemplary embodiments, the first variant Fc domain includes heterodimerization skew variants L368D/K370S and the second variant Fc domain includes heterodimerization skew variants S364K/E357Q; each of the first and second variant Fc domains include ablation variants E233P/L234V/L235A/G236_/S267K; and the constant domain (CH1-hinge-CH2-CH3) of the first monomer includes pI variants N208D/Q295E/N384D/Q418E/N421D, wherein numbering is according to EU numbering.

[0670] In some embodiments, the CH1-hinge-CH2-CH3 of the first monomer comprises amino acid variants L368D/K370S/N208D/Q295E/N384D/Q418E/N421D/E233P/L234V/L235A/G236del/S267 K, and the second Fc domain comprises amino acid variants S364K/E357Q/E233P/L234V/L235A/G236del/S267K, wherein numbering is according to EU numbering.

[0671] In some embodiments, the 1+1 CLC format antibody provided herein further includes FcRn variants M428L/N434S, wherein numbering is according to EU numbering.

[0672] In some embodiments, one of the first binding domain or the second binding domain binds CD28 and the other binding domain binds CEACAM5. Any suitable CD28 binding domain and CEACAM5 domain can be included in subject 1+1 CLC format antibody, including any of the CD28 binding domains and CEACAM5 binding domains provided herein or a variant thereof (see, e.g., FIGS. 15-18, 21, 41, 45, 48, and 82). 6. 2+1 CLC Format

[0673] Another heterodimeric antibody format that finds particular use in subject CD28 x anti-CEACAM5 antibodies provided herein is the “2+1 Common Light Chain” or “2+1 CLC” format, which is depicted in FIG. 14D. The 2+1 CLC format includes a first monomer that includes a VH1-CH1-linker-VH1-CH1-hinge-CH2-CH3, wherein the VHls are each a first variable heavy domain and CH2-CH3 is a first Fc domain; a second monomer that includes a VH2-CH1-hinge-CH2-CH3, wherein VH2 is a second variable heavy domain and CH2-CH3 is a second Fc domain; and a third monomer that includes a “common light chain” VL-CL, wherein VL is a common variable light domain and CL is a constant light domain. The VL pairs with each of the VH1s of the first monomer to form two first binding domains, each with a first antigen binding specificity; and the VL pairs with the VH2 to form a second binding domain with a second antigen binding specificity. The linker of the first monomer can be any suitable linker, including any one of the domain linkers or combinations thereof described in FIG. 7. In some embodiments, the 2+1 CLC format antibody is a trivalent antibody.

[0674] In some embodiments, the first and second Fe domains of the 2+1 CLC format are variant Fe domains that include heterodimerization skew variants (e.g., a set of amino acid substitutions as shown in FIGS. 3 and 8). Particularly useful heterodimerization skew variants include S364K/E357Q: L368D/K370S; L368D/K370S: S364K; L368E/K370S: S364K; T411T/E360E/Q362E: D401K; L368D/K370S: S364K/E357L; K370S: S364K/E357Q; T366S/L368A/Y407V: T366W and T366S/L368A/Y407V/Y349C: T366W/S354C (EU numbering)). In exemplary embodiments, one of the first or second variant Fc domains includes heterodimerization skew variants L368D/K370S and the other of the first or second variant Fc domains includes heterodimerization skew variants S364K/E357Q, wherein numbering is according to EU numbering. In exemplary embodiments, the first variant Fc domain includes heterodimerization skew variants L368D/K370S and the second variant Fc domain includes heterodimerization skew variants S364K/E357Q, wherein numbering is according to EU numbering.

[0675] In some embodiments, the variant Fc domains include ablation variants (including those shown in FIG. 5). In some embodiments, each of the first and second variant Fc domains include ablation variants E233P/L234V/L235A/G236_/S267K, wherein numbering is according to EU numbering.

[0676] In some embodiments, the constant domain (CH1-hinge-CH2-CH3) of the first or second monomer includes pI variants (including those shown in FIG. 4). In exemplary embodiments, the constant domain (CH1-hinge-CH2-CH3) of the first or second monomer includes pI variants N208D/Q295E/N384D/Q418E/N421D, wherein numbering is according to EU numbering.

[0677] In some embodiments, the 2+1 CLC format antibody provided herein further includes FcRn variants M428L/N434S, wherein numbering is according to EU numbering.

[0678] In exemplary embodiments, the first variant Fc domain includes heterodimerization skew variants L368D/K370S and the second variant Fc domain includes heterodimerization skew variants S364K/E357Q; each of the first and second variant Fc domains include ablation variants E233P/L234V/L235A/G236_/S267K; and the constant domain (CHT-hinge-CH2-CH3) of the first monomer includes pI variants N208D/Q295E/N384D/Q418E/N421D, wherein numbering is according to EU numbering. In some embodiments, the 2+1 CLC format antibody provided herein further includes FcRn variants M428L/N434S, wherein numbering is according to EU numbering.

[0679] In some embodiments, the CH1-hinge-CH2-CH3 of the second monomer comprises amino acid variants L368D/K370S/N208D/Q295E/N384D/Q418E/N421D/E233P/L234V/L235A/G236del/S267 K, and the first Fc domain comprises amino acid variants S364K/E357Q/E233P/L234V/L235A/G236del/S267K, wherein numbering is according to EU numbering.

[0680] In some embodiments, each of the two first binding domains binds a tumor CEACAM5 and the second binding domain binds CD28. Any suitable CD28 binding domain and CEACAM5 domain can be included in the subject 2+1 CLC format antibody, including any of the CD28 binding domains and CEACAM5 binding domains provided herein or a variant thereof (see, e.g., FIGS. 15-18, 21, 41, 45, 48, and 82). 7. Dual scFv formats

[0681] One heterodimeric antibody format that finds particular use in the subject bispecific anti-CD28 x anti-CEACAM5 antibodies is the dual scFv format, as are known in the art and shown in FIG. 14G. In this embodiment, the heterodimeric bispecific antibody is made up of two scFv-Fc monomers (both in either (vh-scFv linker-vl-[optional domain linker]-CH2-CH3) format or (vl-scFv linker-vh-[optional domain linker]-CH2-CH3) format, or with one monomer in one orientation and the other in the other orientation.

[0682] In this case, all ABDs are in the scFv format. Any suitable CEACAM5 binding domain and CD28 binding domain can be included in anti-CD28 x anti-CEACAM5 antibody in the dual scFv format, including any of the CEACAM5 binding domains and CD28 binding domains provided herein.

[0683] In addition, the Fc domains of the dual scFv format comprise skew variants (e.g. a set of amino acid substitutions as shown in FIGS. 3 and 8, with particularly useful skew variants being selected from the group consisting of S364K/E357Q: L368D/K370S; L368D/K370S: S364K; L368E/K370S: S364K; T411T/E360E/Q362E: D401K; L368D/K370S: S364K/E357L, K370S: S364K/E357Q, T366S/L368A/Y407V: T366W and T366S/L368A/Y407V/Y349C: T366W/S354C), optionally ablation variants (including those shown in FIG. 5), optionally charged scFv linkers (including those shown in FIG. 6) and the heavy chain comprises pI variants (including those shown in FIG. 4).

[0684] In some embodiments, the dual scFv format includes skew variants, pI variants, and ablation variants. Accordingly, some embodiments include formats that comprise: a) a first monomer that comprises the skew variants S364K/E357Q, the ablation variants E233P/L234V/L235A/G236del/S267K, and a scFv that binds a first antigen (VH1-scFv linker-VL1-[optional domain linker]-CH2-CH3 or VL1-scFv linker-VH1-[optional domain linker]-CH2-CH3) and b) a first monomer that comprises the skew variants L368D/K370S, the ablation variants E233P/L234V/L235A/G236del/S267K, and a scFv that binds a second antigen (VH1-scFv linker-VL1-[optional domain linker]-CH2-CH3 or VL1-scFv linker-VH1-[optional domain linker]-CH2-CH3). pI variants can be as outlined herein, but most common will be charged scFv linkers of opposite charge for each monomer. FcRn variants, particularly 428L/434S, can optionally be included.

[0685] Any suitable CEACAM5 binding domain and CD28 binding domain can be included in the dual scFv format, including any of the CEACAM5 binding domains and CD28 binding domains and related VHs and VLs provided herein or a variant thereof (see, e.g., FIGS. 15-18, 21, 41, 45, 48, and 82).

8. One-armed central-scFv

[0686] One heterodimeric antibody format that finds particular use in subject anti-CD28 x anti-CEACAM5 antibodies provided herein is the one-armed central-scFv format shown in FIG. 14K. In this embodiment, one monomer comprises just an Fc domain, while the other monomer includes a Fab domain (a first antigen binding domain), a scFv domain (a second antigen binding domain) and an Fc domain, where the scFv domain is inserted between the Fc domain and the Fc domain.

[0687] In this embodiment, one monomer comprises a first heavy chain comprising a first variable heavy domain, a CH1 domain and Fc domain, with a scFv comprising a scFv variable light domain, an scFv linker and a scFv variable heavy domain. The scFv is covalently attached between the C-terminus of the CH1 domain of the heavy constant domain and the N-terminus of the first Fc domain using domain linkers, in either orientation, VH1-CH1-[optional domain linker]-VH2-scFv linker-VL2-[optional domain linker]-CH2-CH3 or VH1-CH1-[optional domain linker]-VL2-scFv linker-VH2-[optional domain linker]-CH2-CH3. The second monomer comprises an Fc domain (CH2-CH3). This embodiment further utilizes a light chain, comprising a variable light domain and a constant light domain, that associates with the heavy chain to form a Fab. As for many of the embodiments herein, these constructs include skew variants, pI variants, ablation variants, additional Fc variants, etc. as desired and described herein.

[0688] Any suitable CEACAM5 binding domain and CD28 binding domain can be included in the one-armed central-scFv format, including any of the CEACAM5 binding domains and CD28 binding domains and related VHs and VLs provided herein or a variant thereof (see, e.g., FIGS. 15-18, 21, 41, 45, 48, and 82).

9. One-armed scFv-mAb format

[0689] One heterodimeric antibody format that finds particular use in subject anti-CD28 x anti-CEACAM5 antibodies provided herein is the one-armed mAb-scFv format shown in FIG. 14H. This format includes: 1) a first monomer that comprises an “empty” Fc domain; 2) a second monomer that includes a first variable heavy domain (VH), a scFv domain (a second antigen binding domain) and an Fc domain, where the scFv domain is attached to the N-terminus of the first variable heavy domain; and 3) a light chain that includes a first variable light domain and a constant light domain. The first variable heavy domain and the first variable light domain form a first antigen binding domain and the scFv is a second antigen binding domain. In this format, one of the first antigen binding domain and second binding domain binds CD28, and the other antigen binding domain binds CEACAM5. As for many of the embodiments herein, these constructs include skew variants, pI variants, ablation variants, additional Fc variants, etc. as desired and described herein.

[0690] Any suitable CEACAM5 binding domain and CD28 binding domain can be included in the one-armed scFv-mAb format antibody, including any of the CEACAM5 binding domains and CD28 binding domains and related VHs and VLs provided herein or a variant thereof (see, e.g., FIGS. 15-18, 21, 41, 45, 48, and 82).

10. scFv-mAb format

[0691] One heterodimeric antibody format that finds particular use in subject anti-CD28 x anti-CEACAM5 antibodies provided herein is the mAb-scFv format shown in FIG. 141. In this embodiment, the format relies on the use of a N-terminal attachment of a scFv to one of the monomers, thus forming a third antigen binding domain, wherein the Fab portions of the two monomers each bind one target and the “extra” scFv domain binds a different target.

[0692] In this embodiment, the first monomer comprises a first heavy chain (comprising a variable heavy domain and a constant domain), with a N-terminally covalently attached scFv comprising a scFv variable light domain, an scFv linker and a scFv variable heavy domain in either orientation ((vhl-scFv linker-vll-[optional domain linker]- vh2-CH1-hinge-CH2-CH3) or (with the scFv in the opposite orientation) ((vll-scFv linker-vhl-[optional domain linker]-vh2-CHT-hinge-CH2-CH3)). The second monomer comprises a heavy chain VH2-CH1-hinge-CH2-CH3. This embodiment further utilizes a common light chain, comprising a variable light domain and a constant light domain, that associates with the heavy chains to form two identical Fabs. As for many of the embodiments herein, these constructs include skew variants, pI variants, ablation variants, additional Fc variants, etc. as desired and described herein.

[0693] Any suitable CEACAM5 binding domain and CD28 binding domain can be included in the scFv-mAb antibody format, including any of the CEACAM5 binding domains and CD28 binding domains and related VHs and VLs provided herein or a variant thereof (see, e.g., FIGS. 15-18, 21, 41, 45, 48, and 82).

11. mAb-Fv format

[0694] One heterodimeric antibody format that finds particular use in subject anti-CD28 x anti-CEACAM5 antibodies provided herein is the mAb-Fv format (FIG. 14L). In this embodiment, the format relies on the use of a C-terminal attachment of an “extra” variable heavy domain to one monomer and the C-terminal attachment of an “extra” variable light domain to the other monomer, thus forming a third antigen binding domain (i.e. an “extra” Fv domain), wherein the Fab portions of the two monomers bind CD28 and the “extra” Fv domain binds CEACAM5.

[0695] In this embodiment, the first monomer comprises a first heavy chain, comprising a first variable heavy domain and a first constant heavy domain comprising a first Fc domain, with a first variable light domain covalently attached to the C-terminus of the first Fc domain using a domain linker (vhl-CHT-hinge-CH2-CH3-[optional linker]-vl2). The second monomer comprises a second variable heavy domain, a second constant heavy domain comprising a second Fc domain, and a third variable heavy domain covalently attached to the C-terminus of the second Fc domain using a domain linker (vhl-CHT-hinge-CH2-CH3-[optional linker]-vh2. This embodiment further utilizes a common light chain comprising a variable light domain and a constant light domain, which associates with the heavy chains to form two identical Fabs that include two identical Fvs. The two C-terminally attached variable domains make up the “extra” third Fv. As for many of the embodiments herein, these constructs include skew variants, pI variants, ablation variants, additional Fc variants, etc. as desired and described herein.

[0696] Any suitable CEACAM5 binding domain and CD28 binding domain can be included in the mAb-Fv format, including any of the CEACAM5 binding domains and CD28 binding domains and related VHs and VLs provided herein or a variant thereof (see, e.g., FIGS. 15-18, 21, 41, 45 and 48).

12. Central-Fv format

[0697] One heterodimeric antibody format that finds particular use in subject anti-CD28 x anti-CEACAM5 antibodies provided herein is the central-Fv format shown in FIG. 14M. In this embodiment, the format relies on the use of an inserted Fv domain thus forming an “extra” third antigen binding domain, wherein the Fab portions of the two monomers bind CEACAM5 and the “extra” central-Fv domain binds CD28. The Fv domain is inserted between the Fc domain and the CH1-Fv region of the monomers, thus providing a third antigen binding domain, wherein each monomer contains a component of the Fv (e.g. one monomer comprises a variable heavy domain and the other a variable light domain of the “extra” central Fv domain).

[0698] In this embodiment, one monomer comprises a first heavy chain comprising a first variable heavy domain, a CH1 domain, and Fc domain and an additional variable light domain. The additional variable light domain is covalently attached between the C-terminus of the CH1 domain of the heavy constant domain and the N-terminus of the first Fc domain using domain linkers (vhl-CH1-[optional linker]-vl2-hinge-CH2-CH3). The other monomer comprises a first heavy chain comprising a first variable heavy domain, a CH1 domain and Fc domain and an additional variable heavy domain (vhl-CH1-[optional linker]-vh2-hinge-CH2-CH3). The additional variable heavy domain is covalently attached between the C-terminus of the CH1 domain of the heavy constant domain and the N-terminus of the first Fc domain using domain linkers. This embodiment utilizes a common light chain, comprising a variable light domain and a constant light domain, that associates with the heavy chains to form two identical Fabs that each bind CEACAM5. The additional variable heavy domain and additional variable light domain form an “extra” central Fv that binds CD28. As for many of the embodiments herein, these constructs include skew variants, pI variants, ablation variants, additional Fc variants, etc. as desired and described herein.

[0699] Any suitable CEACAM5 binding domain and CD28 binding domain can be included in the central-Fv format, including any of the CEACAM5 binding domains and CD28 binding domains and related VHs and VLs provided herein or a variant thereof (see, e.g., FIGS. 15-18, 21, 41, 45, 48, and 82). 13. Non-heterodimeric bispecific antibodies

[0700] As will be appreciated by those in the art, the anti-CD28 x anti-CEACAM5 antibodies provided herein can also be included in non-heterodimeric bispecific formats (see FIG. 14J). In this format, the anti-CD28 x anti-CEACAM5 includes: 1) a first monomer comprising a VH1-CHT-hinge-CH2-CH3; 2) a second monomer comprising a VH2-CH1-hinge-CH2-CH3; 3) a first light chain comprising a VL1-CL; and 4) a second light chain comprising a VL2-CL. In such embodiments, the VH1 and VL1 form a first antigen binding domain and VH2 and VL2 form a second antigen binding domain. One of the first or second antigen binding domains binds CD28 and the other antigen binding domain binds CEACAM5.

[0701] Any suitable CEACAM5 binding domain and CD28 binding domain can be included in anti-CD28 x anti-CEACAM5 antibody in the non-heterodimeric bispecific antibody format, including any of the CEACAM5 binding domains and CD28 binding domains and related VHs and VLs provided herein or a variant thereof (see, e.g., FIGS. 15-18, 21, 41, 45, 48, and 82).

### 14. Trident Format

[0702] In some embodiments, the anti-CD28 x anti-CEACAM5 antibodies provided herein are in the “Trident” format as generally described in WO2015/184203, hereby expressly incorporated by reference in its entirety and in particular for the Figures, Legends, definitions and sequences of “Heterodimer-Promoting Domains” or “HPDs”, including “K-coil” and “E-coil” sequences. Tridents rely on using two different HPDs that associate to form a heterodimeric structure as a component of the structure, see FIG. 14N. In this embodiment, the Trident format include a “traditional” heavy and light chain (e.g. VH1-CH1-hinge-CH2-CH3 and VL1-CL), a third chain comprising a first “diabody-type binding domain” or “DART®”, VH2-(linker)-VL3-HPD1 and a fourth chain comprising a second DART®, VH3-(linker)-(linker)-VL2-HPD2. The VH1 and VL1 form a first ABD, the VH2 and VL2 form a second ABD, and the VH3 and VL3 form a third ABD. In some cases, as is shown in FIG. 14N, the second and third ABDs bind the same antigen.

[0703] Any suitable CEACAM5 binding domain and CD28 binding domain can be included in the trident format, including any of the CEACAM5 binding domains and CD28 binding domains and related VHs and VLs provided herein or a variant thereof (see, e.g., FIGS. 15-18, 21, 41, 45, 48, and 82).

### VI. Nucleic Acids

[0704] In another aspect, provided herein are nucleic acid compositions encoding the anti-CD28 x anti-STEAP1 antibodies provided herein. Anucleic acid composition may refer to one or multiple polynucleotides.

[0705] As will be appreciated by those in the art, the nucleic acid compositions will depend on the format and scaffold of the heterodimeric protein. Thus, for example, when the format requires three amino acid sequences, such as for the 1+1 Fab-scFv-Fc, 2+1 mAb-scFv, 2+1 Fab2-scFv-Fc, and 2+1 Fab2-Fc x scFv-Fc formats, three polynucleotides can be incorporated into one or more expression vectors for expression. In exemplary embodiments, each polynucleotide is incorporated into a different expression vector.

[0706] As is known in the art, the nucleic acids encoding the components of the binding domains and antibodies disclosed herein can be incorporated into expression vectors as is known in the art, and depending on the host cells used to produce the heterodimeric antibodies of the invention. Generally the nucleic acids are operably linked to any number of regulatory elements (promoters, origin of replication, selectable markers, ribosomal binding sites, inducers, etc.). The expression vectors can be extra-chromosomal or integrating vectors.

[0707] The polynucleotides and/or expression vectors of the invention are then transformed into any number of different types of host cells as is well known in the art, including mammalian, bacterial, yeast, insect and/or fungal cells, with mammalian cells (e.g., CHO cells), finding use in many embodiments.

[0708] In some embodiments, polynucleotides encoding each monomer are each contained within a single expression vector, generally under different or the same promoter controls. In embodiments of particular use in the present invention, each of these polynucleotides are contained on different expression vectors. As shown herein and in U.S. 62/025,931, hereby incorporated by reference, different vector ratios can be used to drive heterodimer formation. That is, surprisingly, while the proteins comprise first monomer: second monomer:light chains (in the case of many of the embodiments herein that have three polypeptides comprising the heterodimeric antibody) in a 1:1:2 ratio, these are not the ratios that give the best results.

[0709] The antibodies provided herein are made by culturing host cells comprising the expression vector(s) as is well known in the art. Once produced, traditional antibody purification steps are done, including an ion exchange chromatography step. As discussed herein, having the pIs of the two monomers differ by at least 0.5 can allow separation by ion exchange chromatography or isoelectric focusing, or other methods sensitive to isoelectric point. That is, the inclusion of pI substitutions that alter the isoelectric point (pI) of each monomer so that such that each monomer has a different pI and the heterodimer also has a distinct pI, thus facilitating isoelectric purification of the “1+1 Fab-scFv-Fc” heterodimer (e.g., anionic exchange columns, cationic exchange columns). These substitutions also aid in the determination and monitoring of any contaminating dual scFv-Fc and mAb homodimers post-purification (e.g., IEF gels, cIEF, and analytical IEX columns).

VII. Biological and Biochemical Functionality of the anti-CD28 x anti-STEAP1 Antibodies

[0710] Generally the anti-CD28 x anti-STEAP1 antibodies described herein are administered to patients with a STEAP1 -associated cancer, and efficacy is assessed, in a number of ways as described herein. Thus, while standard assays of efficacy can be run, such as cancer load, size of tumor, evaluation of presence or extent of metastasis, etc., immuno-oncology treatments can be assessed on the basis of immune status evaluations as well. This can be done in a number of ways, including both in vitro and in vivo assays.

### A. Antibody Compositions for In Vivo Administration

[0711] Embodiments of the invention relate to a pharmaceutical composition comprising any one of the anti-CD28 x anti-STEAP1 antibodies described herein and a pharmaceutically acceptable carrier. Formulations of the anti-CD28 x anti-STEAP1 antibodies described herein are prepared for storage by mixing an antibody having the desired degree of purity with optional pharmaceutically acceptable carriers, excipients or stabilizers (Remington's Pharmaceutical Sciences 16th edition, Osol, A. Ed. [1980]), in the form of lyophilized formulations or aqueous solutions. Acceptable carriers, excipients, or stabilizers are nontoxic to recipients at the dosages and concentrations employed, and include buffers such as phosphate, citrate, and other organic acids; antioxidants including ascorbic acid and methionine; preservatives (such as octadecyldimethylbenzyl ammonium chloride; hexamethonium chloride; benzalkonium chloride, benzethonium chloride; phenol, butyl or benzyl alcohol; alkyl parabens such as methyl or propyl paraben; catechol; resorcinol; cyclohexanol; 3-pentanol; and m-cresol); low molecular weight (less than about 10 residues) polypeptides; proteins, such as serum albumin, gelatin, or immunoglobulins; hydrophilic polymers such as polyvinylpyrrolidone; amino acids such as glycine, glutamine, asparagine, histidine, arginine, or lysine; monosaccharides, disaccharides, and other carbohydrates including glucose, mannose, or dextrins; chelating agents such as EDTA; sugars such as sucrose, mannitol, trehalose or sorbitol; salt-forming counter-ions such as sodium; metal complexes (e.g., Zn-protein complexes); and/or non-ionic surfactants such as TWEEN™, PLURONICS™ or polyethylene glycol (PEG).

### VIII. Treatments

[0712] Once made, the compositions of the invention find use in a number of oncology applications, by treating cancer, generally by enhancing immune responses (e.g., T cell activation and proliferation), particularly when used with anti-cancer therapies such as anti-tumor bispecific antibodies. In some embodiments, the antibodies provided herein enhance immune responses (e.g., T cell activation and proliferation) by providing agonistic co-stimulation of T cells in the microenvironment of tumors expressing STEAP1 . In some embodiments, the antibodies provided herein enhance immune responses (e.g., T cell activation and proliferation) by providing agonistic co-stimulation of T cells in the microenvironment of tumors expressing CEACAM5.

[0713] In some embodiments, the anti-CD28 x anti-STEAP1 bispecific antibodies provided herein are administered with an anti-tumor therapy including, for example, anti-tumor-associated antigen (TAA) bispecific antibodies. In some embodiments, the anti-CD28 x anti-CEACAM5 bispecific antibodies provided herein are administered with an anti-tumor therapy including, for example, anti-tumor-associated antigen (TAA) bispecific antibodies.

A. Anti-CD28 x anti-STEAP1 /anti-STEAP1 bispecific antibody

[0714] In some embodiments, the anti-CD28 x anti-STEAP1 antibodies provided herein are administered with an anti-STEAP1 bispecific antibody that is a T-cell engaging bispecific antibody, such as those that bind to human CD3.

[0715] In classic T cell/APC interaction, there is a first signal provided by TCR reactivity with peptide-MHC (Signal 1) and a second signal provided by CD28 crosslinking by CD80/CD86 being expressed on APCs (Signal 2) which together fully activate T cells (see FIG. 23A). In contrast, only the first signal is provided in treatment with CD3 bispecific antibodies that target a tumor-associated antigen (TAA) (i.e., anti-CD3 x anti-STEAP1 bispecific antibodies).

[0716] Without being bound by any particular theory of operation, it is believed that the anti-CD28 x anti-STEAP1 bispecific antibodies provided herein can enhance the anti-tumor response of an anti-CD3 x anti-STEAP1 bispecific antibody by CD28 costimulation (see FIG. 23B). Thus, in one aspect, provided herein are methods of methods of treating a STEAP1 -associated cancer in a patient by administering the patient an anti-CD3 x anti-STEAP1 bispecific antibody and an anti-CD28 x anti-STEAP1 bispecific antibody provided herein.

[0717] Anti-CD3 x anti-STEAP1 antibodies that are useful for providing “signal 1” in combination with the subject anti-CD28 x anti-STEAP1 antibodies include those with any of the CD3 binding domains and STEAP1 binding domains provided herein (see, e.g., FIGS. 22 and 25). Suitable antibody formats for such anti-CD3 x anti-STEAP1 antibodies, include, but are not limited to the antibody formats described herein (see, e.g., FIG. 14). In some embodiments, the anti-CD3 x anti-STEAP1 antibody and the anti-CD28 x anti-STEAP1 antibody used in combination bind to the same STEAP1 epitope. In some embodiments, the anti-CD3 x anti-STEAP1 antibody and the anti-CD28 x anti-STEAP1 antibody used in combination bind to different STEAP1 epitopes.

B. Anti-CD28 x anti-CEACAM5/anti-CEACAM5 bispecific antibody

[0718] In some embodiments, the anti-CD28 x anti-CEACAM5 antibodies provided herein are administered with an anti-CEACAM5 bispecific antibody that is a T-cell engaging bispecific antibody, such as those that bind to human CD3.

[0719] In classic T cell/APC interaction, there is a first signal provided by TCR reactivity with peptide-MHC (Signal 1) and a second signal provided by CD28 crosslinking by CD80/CD86 being expressed on APCs (Signal 2) which together fully activate T cells (see FIG. 23A). In contrast, only the first signal is provided in treatment with CD3 bispecific antibodies that target a tumor-associated antigen (TAA) (i.e., anti-CD3 x anti-CEACAM5 bispecific antibodies).

[0720] Without being bound by any particular theory of operation, it is believed that the anti-CD28 x anti-CEACAM5 bispecific antibodies provided herein can enhance the anti-tumor response of an anti-CD3 x anti-CEACAM5 bispecific antibody by CD28 co-stimulation (see FIG. 23B). Thus, in one aspect, provided herein are methods of methods of treating a CEACAM5-associated cancer in a patient by administering the patient an anti-CD3 x anti-CEACAM5 bispecific antibody and an anti-CD28 x anti-CEACAM5 bispecific antibody provided herein.

[0721] Anti-CD3 x anti-CEACAM5 antibodies that are useful for providing “signal 1” in combination with the subject anti-CD28 x anti-CEACAM5 antibodies include those with any of the CD3 binding domains and CEACAM5 binding domains provided herein (see, e.g., FIGS. 41, 45 and 25). Suitable antibody formats for such anti-CD3 x anti-CEACAM5 antibodies, include, but are not limited to the antibody formats described herein (see, e.g., FIG. 14). In some embodiments, the anti-CD3 x anti-CEACAM5 antibody and the anti-CD28 x anti-CEACAM5 antibody used in combination bind to the same CEACAM5 epitope. In some embodiments, the anti-CD3 x anti-CEACAM5 antibody and the anti-CD28 x anti-CEACAM5 antibody used in combination bind to different CEACAM5 epitopes.

C. Administrative modalities

[0722] The antibodies provided herein administered to a subject, in accord with known methods, such as intravenous administration as a bolus or by continuous infusion over a period of time.

D. Treatment modalities

[0723] In the methods of the invention, therapy is used to provide a positive therapeutic response with respect to a disease or condition.

[0724] By “positive therapeutic response” is intended an improvement in the disease or condition, and/or an improvement in the symptoms associated with the disease or condition. For example, a positive therapeutic response would refer to one or more of the following improvements in the disease: (1) a reduction in the number of neoplastic cells; (2) an increase in neoplastic cell death; (3) inhibition of neoplastic cell survival; (5) inhibition (i.e., slowing to some extent, preferably halting) of tumor growth; (6) an increased patient survival rate; and (7) some relief from one or more symptoms associated with the disease or condition.

[0725] Positive therapeutic responses in any given disease or condition can be determined by standardized response criteria specific to that disease or condition. Tumor response can be assessed for changes in tumor morphology (i.e., overall tumor burden, tumor size, and the like) using screening techniques such as magnetic resonance imaging (MRI) scan, x-radiographic imaging, computed tomographic (CT) scan, bone scan imaging, endoscopy, and tumor biopsy sampling including bone marrow aspiration (BMA) and counting of tumor cells in the circulation.

[0726] In addition to these positive therapeutic responses, the subject undergoing therapy may experience the beneficial effect of an improvement in the symptoms associated with the disease.

[0727] Treatment according to the present invention includes a “therapeutically effective amount” of the medicaments used. A “therapeutically effective amount” refers to an amount effective, at dosages and for periods of time necessary, to achieve a desired therapeutic result.

[0728] A therapeutically effective amount may vary according to factors such as the disease state, age, sex, and weight of the individual, and the ability of the medicaments to elicit a desired response in the individual. A therapeutically effective amount is also one in which any toxic or detrimental effects of the antibody or antibody portion are outweighed by the therapeutically beneficial effects.

[0729] A “therapeutically effective amount” for tumor therapy may also be measured by its ability to stabilize the progression of disease. The ability of a compound to inhibit cancer may be evaluated in an animal model system predictive of efficacy in human tumors.

[0730] Alternatively, this property of a composition may be evaluated by examining the ability of the compound to inhibit cell growth or to induce apoptosis by in vitro assays known to the skilled practitioner. A therapeutically effective amount of a therapeutic compound may decrease tumor size, or otherwise ameliorate symptoms in a subject. One of ordinary skill in the art would be able to determine such amounts based on such factors as the subject's size, the severity of the subject's symptoms, and the particular composition or route of administration selected.

[0731] Dosage regimens are adjusted to provide the optimum desired response (e.g., a therapeutic response). For example, a single bolus may be administered, several divided doses may be administered over time or the dose may be proportionally reduced or increased as indicated by the exigencies of the therapeutic situation. Parenteral compositions may be formulated in dosage unit form for ease of administration and uniformity of dosage. Dosage unit form as used herein refers to physically discrete units suited as unitary dosages for the subjects to be treated; each unit contains a predetermined quantity of active compound calculated to produce the desired therapeutic effect in association with the required pharmaceutical carrier.

[0732] The specification for the dosage unit forms of the present invention are dictated by and directly dependent on (a) the unique characteristics of the active compound and the particular therapeutic effect to be achieved, and (b) the limitations inherent in the art of compounding such an active compound for the treatment of sensitivity in individuals.

[0733] The efficient dosages and the dosage regimens for the bispecific antibodies used in the present invention depend on the disease or condition to be treated and may be determined by the persons skilled in the art.

### EXAMPLES

### Example 1: CD28 Binding Domains

[0734] Sequences for human, mouse, and cynomolgus CD28 are depicted in FIG. 1 and are useful for the development of cross-reactive CD28 antigen binding domains for ease of clinical development. 1A: Novel CD28 Binding Domains

[0735] An approach considered to avoid the superagonism associated with TGN1412 was to generate novel CD28 binding domains having lower affinity binding to CD28 and/or binding to a different CD28 epitope than TGN1412. In one campaign to generate such novel CD28 binding domains, in-house de novo phage libraries were panned against CD28.

[0736] 1A(a): Phage-derived clone IA7

[0737] It should be noted that this phage library utilized a human germline VL with diversity introduced into the LCDR3. The amino acid sequences for exemplary phage-derived clone IA7 are depicted in FIG. 15.

[0738] Towards optimization of CD28 bsAbs, numerous 1A7 affinity variants were developed by engineering VH variants (illustrative sequences as depicted in FIG. 16 and as SEQ ID NOs: XXX-YYY), VL variants (illustrative sequences as depicted in FIG. 17 and as SEQ ID NOs: XXX-YYY), consensus sequences for which are depicted in FIG. 19, and combinations thereof (illustrative sequences for which are depicted in FIG. 18). Monovalent affinity of illustrative variants, in the context of scFvs, are depicted in FIG. 20.

[0739] Surprisingly, it was found that the variable light domain of clone IA7 differed from parental germline IGKV1-39 VL by only a single amino acid in the LCDR3; however, despite there being only a single amino acid difference, the VH of 1A7 does not pair well with the parental germline VL resulting in diminished binding. For example, 1A7_H1.14_L1 showed an affinity of −200 nM, while IA7_H1.14_IGKV1-39 showed at affinity of>1 pM.

[0740] However, it is important that the IA7 VHs pair with IGKV1-39 so that they may be used in common light chain bispecific formats and paired with other binding domains utilizing the IGKV1-39 variable light domain. Accordingly, affinity-optimization phage library was generated with focus on substitutions only in the variable heavy domain of 1A7. Amino acid sequences for exemplary affinity-optimized IA7 variable domains for pairing with IGKV1-39 are depicted in FIG. 46 and SEQ ID Nos: XXX-YYY. Monovalent KD of affinity-optimized 1A7 Fab variants were determined via Octet, data for which are depicted in FIG. 47.

[0741] After identifying these additional 1A7 VH variants, favorite variants were paired with the original 1A7_L1 and L1.71 VLs to generate further affinity variants (in the context of scFvs). KD of these additional variants are depicted in FIG. 64. Finally, to stabilize formats comprising scFvs, disulfide-stabilized scFvs may be used. This may potentially improve behavior in high concentration formulations, boost thermal stability, and prevent Fab-LC intercalation. Disulfide-stabilized scFvs may be achieved by including cysteine substitutions in the VH and VL so that a disulfide bond is formed between the two cysteines. Illustrative such disulfide-stabilized scFvs are depicted in FIG. 65, and KD are depicted in FIG. 64. Additionally, as depicted in FIG. 63, disulfide stabilization improved melting temperature by 5.7° C.

### 1B: Additional CD28 Binding Domains

[0742] Sequences for additional CD28 binding domains which may find use in the STEAP1 x CD28 bsAbs and CEACAM5 x CD28 bsAbs of the invention are depicted in FIG. 21.

### Example 2: STEAP1 Binding Domains

[0743] Sequences for human and mouse STEAP1 are depicted in FIG. 2 and are useful for the development of cross-reactive STEAP1 antigen binding domains for ease of clinical development. Sequences for STEAP1 binding domains which may find use in the STEAP1 x CD28 bsAbs of the invention are depicted in FIG. 22, FIG. 31, and FIG. 32.

2A: Humanization & optimization of STEAP-A binding domains

[0744] The variable regions of a murine anti-STEAP1 clone STEAP-A were humanized using string content optimization (see, e.g., U.S. Pat. No. 7,657,380, issued Feb. 2, 2010). Murine (H0L0) and humanized (H1L1) STEAP-A variable regions are depicted in FIG. 22. Next, the humanized STEAP-A variable heavy and variable light sequences were engineered for optimization by removing sequence liabilities such as isomerization & deamidation sites. Optimized STEAP-A variants were designated as L1.1-L1.3 for VLs and H1.1-H1.38 for VHs. Sequences for each variant VH and VL are depicted in FIGS. 31 and 32, respectively. Notably, the VH substitution designated H1.21, removed 2 isomerization sites at positions 109 and 110, substituting D109E and D110L (numbering as in Kabat), without impacting affinity. Additionally, sequences for these variants in the context of a bivalent mAb are depicted in FIG. 30. 2B: Affinity maturation of STEAP-A binding domains

[0745] Optimized humanized STEAP-A variants were then engineered in order to improve their binding affinity to STEAP-1. In the first round, 82 variant VLs were engineered as L1.4-L1.85 and 151 variant VHs were engineered as H1.39-H1.189. Variants were produced as bivalent mAbs, the sequences for which are depicted in FIG. 30. The bivalent mAbs were then screened for binding to STEAP-1 on C4-2B cells. Cells were mixed with mAbs and incubated for 1 hour on ice, washed with PBS, stained with secondary antibody for 1 hour on ice, and washed again before analyzing binding utilizing flow cytometry. Out of these hundreds of variants, 18 showed tighter or comparable binding compared to the parental clone. Variants that showed improved binding over the parental humanized STEAP-A_H1L1, such as L1.47 (having a K36R point substitution as in Kabat) and L1.56 (having a S58Y point substitution as in Kabat) were combined in various ways with other substitutions to create a second round of affinity maturation variants.

[0746] In the second round, 34 variant VLs were engineered and designated as L1.86-L1.119 and 39 variant VHs were engineered and designated as H1.190-H1.228. Bivalent mAbs from the second round of affinity maturation were also screened for binding to STEAP-1 expressed on C4-2B cells. Flow cytometry analysis was used to determine relative maximum MFI values, AUC values, and approximate EC50 values for each test article, as summarized in FIG. 34. Some combinations of substitutions, such as XENP46525, having the H1.194 (S75R/D109E/D110L as in Kabat) variable heavy in combination with the L1.87 (S26D/S49P/T69S as in Kabat) variable light resulted in weaker binding than the original H1L1, illustrating the unpredictable nature of combining substitutions. However, many other test articles, such as XENP46500, having the H1.21 (D109E/D110L as in Kabat) variable heavy and L1.115 (S28T/S49P/S58Y/T69S/N99K as in Kabat) variable light domain, showed significantly improved binding when compared to one of the strongest single point substitution binders, XENP45835, having the variable light domain L1.56 (S58Y as in Kabat). A final set of variable heavy domain substitutions were engineered and designated H1.229- H1.232. These all showed comparable binding to H1.228. Sequences for each variant VH and VL are depicted in FIGS. 31 and 32, respectively.

[0747] While the affinity maturation campaign resulted in the identification of many variable heavy and variable light domains that showed significantly improved binding to STEAP1 when compared with the parental humanized H1L1, two variable light chains found particular use in the invention: L1.100, having substitutions S28T S49P S58Y T69S (numbering as in Kabat), and L1.115, having substitutions S28T S49P S58Y T69S N99K (numbering as in Kabat). Additionally, one variable heavy chain found particular use in the invention: H1.230, having substitutions A35S S54G N55T S63V Di09E D110L. These sequences and their CDRs are depicted in FIG. 39.

### Example 3: CEACAM5 Binding Domains

[0748] Sequences for human, mouse, and cynomolgus CEACAM5 are depicted in Figure and are useful for the development of cross-reactive CEACAM5 antigen binding domains for ease of clinical development. Sequences for CEACAM5 binding domains which may find use in the CEACAM5 x CD28 bsAbs of the invention are depicted in FIG. 41 and FIG. 45.

### 2A: Humanizing and Affinity-Engineering CEA-A

[0749] The CEA-A_H0L0 binding domain was humanized using string content optimization (see, e.g., U.S., Pat. No. 7,657,380), sequences for which are depicted in FIG. 45. The parental CEA-A H0 VH had 70% humanness, and the L0 VL had 65% humanness. Humanized VH variant H1 had 84% humanness. Two humanized VL variants L1 and L2 were engineered which respectively achieved 82% and 88% humanness. Surprisingly, the humanized H1L1 and HIL2 CEA-A binding domains were decreased in affinity for CEACAM5 (H0L0=0.7-2 nM; H1L1=5-8 nM; H1L2=57-69 nM at 25° C.).

[0750] To restore affinity, the H1, L1, and L2 domains were affinity-engineered through a number of mechanisms including germlining, back mutations to parental H0L0, and removing degradation labile amino acids. Amino acid sequences for exemplary affinity-optimized humanized CEA-A variable domains are depicted in FIG. 45 and SEQ ID Nos: XXX-YYY.

[0751] One such variant, H1.7_L2.15 which included removing a potential HCDR2 deamidation and framework germlining (in each of the variable heavy and variable light domains) achieved 13 nM CEACAM5 binding affinity (86% humanness in VH; 86% humanness in VL).Finally using CEA-A H1.7_L2.15 as a new starting point, further variants were engineered to reduce cross-reactive binding to other members of the CEA family. These efforts are further described in Example X. Amino acid sequences for exemplary such sequences are depicted in FIG. 45 and SEQ ID NOs: XXX-YYY. One such variant, H1.13_L2.15 was reduced in CEACAM8 binding affinity (10890 nM vs. 3330 nM for the H1.7_L2.15 variant) while maintaining CEACAM5 binding affinity (18 nM vs. 13 nM for the H1.7_L2.15 variant).

### Example 4: Engineering STEAP1 x CD28 and CEACAM5 x CD28 bsAbs

[0752] T cells require multiple signals for complete activation and differentiation. Signal 1, promoted by recognition of a peptide-MHC (pMHC) complex by the T cell receptor (TCR), is absolutely required for T cell activation. Signal 2, which synergizes with, and amplifies Signal 1, is typically provided by the interaction of the CD28 ligands CD80 and CD86 with CD28 itself. Although CD28 engagement alone is typically inert, when combined with Signal 1 activation, it promotes additional activation, survival, and proliferative signals, including IL2 secretion (see FIG. 23). As CD80 and CD86 are only naturally expressed by professional antigen-presenting cells (APC), the extent of CD28 costimulation in the tumor setting can be highly variable. By creating this novel class of tumor-targeted CD28 bispecific antibodies, CD80/CD86 engagement of CD28 can be mimicked, providing an artificial source of Signal 2. Notably, signal can either be provided by the natural TCR:pMHC recognition of tumor cells, or it can be provided by combination of the CD28 bispecific with a CD3 bispecific (which can mimic Signal 1). With these concepts in mind, STEAP1 x CD28 and CEACAM5 x CD28 bsAbs were conceived, and a number of formats are contemplated for use, schematics for which are outlined in FIG. 14.

### 4A: 1+1 Fab-scFv-Fc Format

[0753] One exemplary format utilizing Fab domains and scFv is the 1+1 Fab-scFv-Fc format (depicted schematically in FIG. 14A) which comprises a first monomer comprising a single-chain Fv (“scFv”) with a first antigen binding specificity covalently attached to a first heterodimeric Fc domain i.e., scFv-domain linker-CH2-CH3, a second monomer comprising a heavy chain i.e., VH-CH1-hinge-CH2-CH3, wherein the CH2-CH3 is a second heterodimeric Fc domain complementary to the first heterodimeric Fc domain, and a light chain (LC) transfected separately so that a Fab domain having a second antigen binding specificity is formed with the variable heavy domain. Any number of heterodimerization approaches as is known in the art could find use in this (and other) bispecific formats, in combination with any number of approaches for purifying heterodimers from contaminating homodimers, including those depicted in FIG. 3. Any of the number of linkers as is known in the art may find use in linking the VH and VL domains of the scFv. Finally, it may be useful to maximize serum half-life of the bsAbs, and any of the number of half-life extending variants as is known in the art may find use in these bsAbs.

[0754] In particular, the 1+1 Fab-scFv-Fc bsAbs may utilize Backbones 1 or 11 in FIG. 9. The backbones utilize the L368D/K370S (on the HC): S364K/E357Q (on the scFv-Fc) heterodimeric Fc variants. The HC side further includes pI variants N208D/Q295E/N384D/Q418E/N421D to increase negative charge of the heavy chain. The scFv utilizes a positively charged (GKPGS)₄ linker (SEQ ID NO: 24) between the VH and VL domains to increase positive charge of the scFv-Fc chain. Collectively, these two approaches enable easy purification of heterodimers from contaminating homodimers. The FcγR ablation variants utilized in this platform are the E233P/L234V/L235A/G236del/S267K substitutions on both the HC and the scFv-Fc monomers. In some cases, bsAbs includes the M428L/N434S half-life extension variants. Sequences for illustrative STEAP1 x CD28 bsAbs in the 1+1 Fab-scFv-Fc format are depicted in FIG. 24. Sequences for illustrative CEACAM5 x CD28 bsAbs in the 1+1 Fab-scFv-Fc format are depicted in FIG. 42. 4B: 2+1 mAb-scFv Format

[0755] Another exemplary format utilizing Fab domains and scFv is the 2+1 mAb-scFv format (depicted schematically in FIG. 14E) which comprises a first monomer comprising a first heavy chain covalently attached to a single-chain Fv (“scFv”) with a first antigen binding specificity i.e., VH-CH1-hinge-CH2-CH3-domain linker-scFv, wherein CH2-CH3 is a first heterodimeric Fc domain; a second monomer comprising a heavy chain i.e., VH-CH1-hinge-CH2-CH3, wherein the CH2-CH3 is a second heterodimeric Fc domain complementary to the first heterodimeric Fc domain, and a light chain (LC) transfected separately so that a Fab domains having a second antigen binding specificity are formed with the two VH domains. In particular, the 2+1 Fab-scFv-Fc bsAbs may utilize backbone in FIG. 10. The backbones utilize the L368D/K370S (on the HC): S364K/E357Q (on the HC-scFv side) heterodimeric Fc variants. The HC further includes pI variants N208D/Q295E/N384D/Q418E/N421D to increase negative charge of the heavy chain. The scFv utilizes a positively charged (GKPGS)₄ linker (SEQ ID NO: 24) between the VH and VL domains to increase positive charge of the HC-scFv chain. Collectively, these two approaches enable easy purification of heterodimers from contaminating homodimers. The FcγR ablation variants utilized in this platform are the E233P/L234V/L235A/G236del/S267K substitutions on both the HC and the scFv-Fc monomers. In some cases, bsAbs includes the M428L/N434S half-life extension variants. Sequences for illustrative STEAP1 x CD28 bsAbs in the 2+1 mAb-scFv Format are depicted in FIG. 27. Sequences for illustrative CEACAM5 x CD28 bsAbs in the 2+1 mAb-scFv format are depicted in FIG. 48. 3C: 2+1 Fab2-Fc x scFv-Fc Format

[0756] Another exemplary format utilizing Fab domains and scFv is the 2+1 Fab₂-Fc x scFv-Fc format (depicted schematically in FIG. 14F) which includes a first monomer, a second monomer, and a light chain. The first monomer comprises a first VH1 domain covalently attached to a first CH1 domain covalently attached (e.g., by a domain linker) to a second VH1 domain covalently attached to a second CH1 domain covalently attached to a first heterodimeric Fc domain (e.g., VH-CH1-VH-CH1-hinge-CH2-CH3). The second monomer comprises a single-chain Fv (“scFv”) covalently attached to a second heterodimeric Fc domain complementary to the first heterodimeric Fc domain (scFv-domain linker-CH2-CH3). The first monomer, second monomer and light chain are transfected separately so that the two VH1-CH1 of the first monomer and the light chain form two antigen binding domains with the same antigen binding specificity. The scFv of the second monomer has a second antigen binding specificity. Sequences for illustrative STEAP1 x CD28 bsAbs in the 2+1 Fab2-Fc x scFv-Fc format are depicted in FIG. 28. Sequences for illustrative CEACAM5 x CD28 bsAbs in the 2+1 Fab2-Fc x scFv-Fc format are depicted in FIG. 50. 4D: 2+1 Fab2-scFv-Fc

[0757] Another exemplary format utilizing Fab domains and scFv is the 2+1 Fab₂-scFv-Fc format (depicted schematically in FIG. 14B) which comprises a first monomer comprising a heavy chain i.e., VH-CH1-hinge-CH2-CH3, wherein the CH2-CH3 is a first heterodimeric Fc domain; a second monomer comprising a VH-CHT-linker-scFv-linker-CH2-CH3, wherein the CH2-CH3 is a second heterodimeric Fc domain complementary to the first heterodimeric Fc domain and wherein the scFv has a first antigen binding specificity; and a light chain (LC) transfected separately so that Fab domains having a second antigen binding specificity are formed with the two VH domains. Sequences for illustrative CEACAM5 x CD28 bsAbs in the 2+1 Fab₂-scFv-Fc format are depicted in FIG. 49.

[0758] Although the above provide particularly useful backbones, any number of heterodimerization approaches as is known in the art could find use in the bispecific formats, in combination with any number of approaches for purifying heterodimers from contaminating homodimers, including those depicted in FIGS. 3. Any of the number of linkers as is known in the art may find use in linking the VH and VL domains of the scFv.

[0759] Finally, it may be useful to maximize serum half-life of the bsAbs, and any of the number of half-life extending variants as is known in the art may find use in these bsAbs. Regardless of bsAb format, the CD28 bispecific antibodies are monovalent for CD28 and incorporate Fc variants engineered to ablate FeyR binding to avoid potential superagonism. Such Fc variants include those depicted in FIG. 5.

### Example 5: STEAP1 x CD28 bsAbs Combine Productively with CD3 bsAbs

[0760] As described in Example 4, the STEAP1 x CD28 bsAbs are contemplated for combination with CD3 bsAbs. Such CD3 bsAbs may utilize the CD3 binding domains as depicted in FIG. 25. As an example, the STEAP1 x CD28 bsAbs may be combined with STEAP1 x CD3 bsAbs (see e.g., U.S. Pat. Nos. 9,982,063, 10,781,258, WO 2021/030586, WO 2021/041300, WO 2021/053587, and WO 2021/098822). Alternatively, the STEAP1 x CD28 bsAbs may be combined with CD3 bsAbs targeting other antigens. 5A: Combination with EpCAM x CD3

[0761] To investigate, 10,000 STEAP1+22Rv1 tumor cells (-90K STEAP1 antigens/cell) were seeded per well in a plate. The next day, purified T cells were added at a 1:10 effector to target ratio and incubated with 1 μg/ml illustrative EpCAM x CD3 bsAb and STEAP1 x CD28 bsAb XENP44652 at the concentrations indicated in FIG. 26. After 24 hours at 37° C., cell supematants were assayed by MSD for IL-2 (Meso Scale Discovery, Rockville, Md.). Data as depicted in FIG. 26 illustrates that STEAP1 x CD28 bsAb XENP44652 enhances IL-2 secretion driven by the EpCAM x CD3 bsAb. 5B: Combination with B7H3 x CD3

[0762] In an additional experiment, 10,000 STEAP1+22Rv1 tumor cells or wild type 22Rv1 cells were seeded per well in a plate. The following day, T-cells were seeded at an effector to target ratio of 1:1 in the presence of 1 μg/ml illustrative B7H3 x CD3 bsAb and XENP46214 (a STEAP1 x CD28 bsAb in the 1+1 Fab-scFv-Fc format) at the dose range indicated in FIG. 29. IL-2 was assessed after 1 day with MSD (Meso Scale Discovery, Rockville, Md.). As depicted in FIG. 29, when combined with a B7H3 x CD3 engager, XENP46214 is able to conditionally enhance anti-tumor response on target cells with higher levels of STEAP1 expression.

[0763] Furthermore, an experiment was conducted in which co-cultures of T-cells and STEAP1+22Rv1 tumor cells (1:1 E:T ratio) were treated with 0.5 pg/mL of an illustrative B7H3 x CD3 bsAb, either alone or in combination with 1 μg/mL of a STEAP1 x CD28 bsAb.

[0764] Cell killing was tracked and analyzed over a period of 6 days via Incucyte. As illustrated in FIG. 33, when combined with a B7H3 x CD3 bsAb, STEAP1 x CD28 bsAbs significantly enhanced target cell killing. Additionally, XENP46214, having the STEAP-A L1.56 affinity matured variable light domain, showed improved target cell killing compared to XENP44652, having the parental humanized STEAP-A H1L1 binding domain. 5C: Combination with PSMA x CD3

[0765] FIG. 35A illustrates the productive combination of STEAP1 x CD28 bsAbs with an illustrative PSMA x CD3 bsAb. Co-cultures of T cells and 22Rv1 cells (having—12,000 STEAP1 antigens, 120,000 B7H3 antigens, and 30,000 PSMA antigens) were seeded at a 1:1 E:T ratio and were treated with 1 μg/mL of the indicated CD28 bsAb in combination with 10 μg/mL of illustrative PSMA x CD3 bsAb. Cell killing was tracked and analyzed over time via Incucyte. STEAP1 x CD28 bsAbs XENP47235 and XENP47241 induced significantly better tumor cell killing when compared with illustrative B7H3 x CD28 bsAb. 5D: Combination with STEAP1 x CD3

[0766] FIG. 35B illustrates the productive combination of STEAP1 x CD28 bsAbs with an illustrative STEAP1 x CD3 bsAb. Co-cultures of T cells and 22Rv1 cells (having—12,000 STEAP1 antigens, 120,000 B7H3 antigens, and 30,000 PSMA antigens) were seeded at a 1:1 E:T ratio and were treated with 1 μg/mL of the indicated CD28 bsAb in combination with 10 μg/mL of illustrative STEAP1 x CD3 bsAb. Cell killing was tracked and analyzed over time via Incucyte. STEAP1 x CD28 bsAbs XENP47235 and XENP47241 induced significantly better tumor cell killing when compared with illustrative B7H3 x CD28 bsAb.

### Example 6: Tuning STEAP1 Binding Valency

[0767] STEAP1 x CD28 bsAbs were engineered in 2+1 formats (mAb-scFv or Fab₂-scFv-Fc) to investigate the effects of bivalent binding to STEAP1 antigen compared with monovalent binding of a STEAP1 x CD28 bsAb in the 1+1 Fab-scFv format. LOX-IMVI cells (which express both STEAP1 at—8000 antigens/cell as well as an aCD3-scFv in order to provide Signal 1) were mixed with purified T cells at a 1:1 E:T ratio. As depicted in FIG. 36, XENP47235 in the 1+1 Fab-scFv-Fc format reaches a higher level of binding as measured by the MFI, indicating a higher antigen binding capacity and potentially higher efficacy. However, XENP47241 in the 2+1 mab-scFv displayed avid binding and a more potent induction of IL2. Each format may be advantageous in different contexts.

### Example 7: Further characterization of STEAP1 x CD28 bsAbs

[0768] In a further experiment, the induction of IL2 secretion from purified T cells incubated with 22RV1-STEAP1 tumor cells at a 1:1 effector:target ratio and 1 ug/ml of illustrative B7H3 x CD3, PSMAx CD3, or STEAP1 x CD3 bispecific and dose escalation of STEAP1 x CD28 bsAb was measured as depicted in FIG. 37. T cell proliferation was measured as well as indicated by CD4⁺ T cell counts as depicted in FIG. 38. STEAP1 x CD28 bsAbs in the 2+1 mAb-scFv format demonstrate a more potent induction of IL-2 and of CD4⁺ T cell proliferation when compared with the 1+1 Fab-scFv format.

### Example 8: CEACAM5 x CD28 bsAbs Combine Productively with CD3 bsAb

[0769] As described in Example 4, the CEACAM5 x CD28 bsAbs are contemplated for combination with CD3 bsAbs. Such CD3 bsAbs may utilize the CD3 binding domains as depicted in FIG. 25. As an example, the CEACAM5 x CD28 bsAbs may be combined with CEACAM5 x CD3 bsAbs (see e.g., U.S. Pat. Nos. 9,982,063, 10,781,258, WO 2021/030586, WO 2021/041300, WO 2021/053587, and WO 2021/098822). Alternatively, the CEACAM5 x CD28 bsAbs may be combined with CD3 bsAbs targeting other antigens.

[0770] To investigate, various CEA+B7H3⁺ tumor cells (varied antigen densities) were mixed with purified T cells (various effector:target E:T as indicated) and incubated with dose escalation CEACAM5 x CD28 bsAbs (with various CEACAM5 binding domains) and 1 μg/ml illustrative B7H3 x CD3 bsAb or dose escalation of illustrative B7H3 x CD3 bsAb and 1 μg/ml CEACAM5 x CD28 bsAb for 24 hr at 37° C. Cell supernatant was assayed by MSD for IL-2 (Meso Scale Discovery, Rockville, Md.). Data as depicted in FIGS. 43 and 44 show that each of the CEACAM5 x CD28 bsAbs enhances IL-2 secretion driven by the B7H3 x CD3 bsAb. Notably, CEACAM5 x CD28 bsAb based on the CEA-A was most potent in activity. Further, functional activity is dependent on CEACAM5 density, albeit active over a wide range. Additionally, CEACAM5 x CD28 bsAb are very reduced in efficacy (as indicated by very low IL-2 secretion) on CEACAM51° tumor cell HT29 representing normal tissue suggesting the bsAbs may be well tolerated. In data not shown, it was additionally found that functional activity of CEACAM5 x CD28 is insensitive to the choice of CD3 bispecific.

[0771] In another experiment, SNU-C1 tumor cells were mixed with purified T cells (1:1 effector:target ET) and incubated with dose escalation CEACAM5 x CD28 bsAb XENP44338 and 1 μg/ml illustrative B7H3 x CD3 bsAb. T cell counts and CD25 expression were determined via FACS. Data as depicted in FIG. 51 show that CEACAM5 x CD28 bsAb enhance T-cell activation and proliferation.

### Example 9: Tuning CEACAM5 x CD28 bsAbs

9A: Tuning CEACAM5x CD28 bsAbs for activity

### 9A(a): Tuning CD28 Binding Affinity

[0772] CEACAM5 x CD28 bsAbs in the 1+1 Fab-scFv-Fc format were engineered with the CEA-A binding domain and a CD28 affinity ladder. HPAF-II (CEA^{high}), MKN45 (CEA^{high}), LS1074, LS174T (CEAmea-iow), or HT-29 (CEAl® ⁰) tumor cells were mixed with purified T cells (1:1 effector:target) and incubated with dose escalation of CEACAM5 x CD28 bsAbs and 1 μg/ml illustrative B7H3 x CD3 bsAb. IL2 secretion was measured after 24 hours, data for which are depicted in FIG. 52. The data show that functional activity is weakly dependent on CD28 affinity. Notably, the tighter CD28 variants (e.g. 37 nM and 96 nM, respectively in XENP44332 and XENP44560) are more active on “normal tissue” proxy (i.e. HT-29).

### 9A(b): Tuning CEACAM5 Binding Valency

[0773] CEACAM5 x CD28 bsAbs were engineered in 2+1 formats (mAb-scFv, Fab2-scFv-Fc, or Fab₂-Fc x scFv-Fc) to investigate whether bivalent binding of CEACAM5 may improve activity. In a first set of experiments, HPAF-II (CEA^{high}), SNU-C1 (CEA^{high}), LS1034 (CEA^{med-low}), LS513 (CEA^{med-low}), or LS174T (CEA^{med-low}) tumor cells were mixed with purified T cells (5:1 or 10:1 effector:target) and incubated with dose escalation of CEACAM5 x CD28 bsAbs in the 1+1 Fab-scFv-Fc, 2+1 mAb-scFv, and 2+1 Fab₂-scFv-Fc formats and 1 μg/ml illustrative B7H3 x CD3 bsAb. In another set of experiments, MKN-45, LS174T, Lovo, and HT-29 cells were mixed with purified T cells at 1:1 effector:target ratio and incubated with dose escalation of CEACAM5 x CD28 bsAbs in the 1+1 Fab-scFv-Fc and 2 +1 Fab₂-Fc x scFv-Fc formats and 1 μg/ml illustrative B7H3 x CD3 bsAb. IL2 secretion was measured after 24 hours, data for which are depicted in FIGS. 53 and 71. The data show that the 1+1 format having monovalent CEACAM5 binding induces more IL-2 release compared to the bivalent CEACAM5 binding formats.

9B: Tuning CEACAM5 x CD28 stability

[0774] CEACAM5 x CD28 bsAbs in the 1+1 Fab-scFv-Fc format were engineered using disulfide-stabilized CD28 binding domains as described in Example 1A. HPAF-II tumor cells were mixed with purified T cells (1:1 effector:target) and incubated with dose escalation of CEACAM5 x CD28 bsAbs and 1 μg/ml illustrative B7H3 x CD3 bsAb. IL2 secretion was measured after 24 hours. Data as depicted in FIGS. 66 and 70 show that disulfide-stabilizing the higher affinity CD28 binding domains (e.g. 37 nM H1.14_L1.71 and 96 nM H1.1_L1.171) brought their activity in line with or slightly stronger than the lower affinity 180 nM CD28 binding domain (H1_L1.71). As depicted in FIG. 70A-70F, this is irrespective of CEA binding affinity and CEA density on target cell lines.

9C: Tuning CEACAM5 x CD28 bsAbs to mitigate blockade by soluble CEACAM5 (sCEA)
9C(a): Bivalent CEACAM5 binding tolerates sCEACAM5

[0775] LS174T tumor cells were mixed with purified T cells (1:1 effector:target) and incubated with dose escalation of CEACAM5 x CD28 bsAbs in the 1+1 Fab-scFv-Fc and 2 +1 Fab₂-Fc x scFv-Fc formats, 1 μg/ml illustrative B7H3 x CD3 bsAb, and increasing concentrations of soluble CEACAM5. IL2 secretion was measured after 24 hours, and EC50 is depicted in FIG. 37. The data show that while the 2+1 format is less efficacious and less potent, it better tolerates soluble CEACAM5 as indicated by higher sCEACAM5 concentrations needed to shift EC50 from baseline. 9C(b): Effect of soluble CEACAM5 is mitigated by reducing CEACAM5 affinity

[0776] Based on mechanism-based modeling (showing formation of trimers per T cell i.e. a trimer of bispecific antibody, T cell, and tumor cell), it was predicted that reducing CEACAM5 affinity mitigated effect of soluble CEACAM5 (modeled data depicted in FIG. 54). Notably, 15 nM CEACAM5 binding affinity appeared to be a sweet spot.

[0777] In an experiment, HPAF-II tumor cells were incubated with purified T cells and CEACAM5 x CD28 bsAbs having a CEACAM5 affinity ladder, 1 μg/ml B7H3 x CD3, and with or without 1 μg/ml sCEACAM5. IL2 secretion was assessed after 24 hours, data depicted in FIG. 56. Consistent with the modeling, the data show that XENP44338 having the tightest ˜0.7 nM CEACAM5 binding affinity was strongly affected by the sCEACAM5.

[0778] XENP44745 having 5 nM CEACAM5 binding affinity was less impacted by sCEACAM5, and XENP44746 having 57 nM CEACAM5 binding affinity was negligibly affected (albeit, much less potent). 9D: Tuning CEACAM5 x CD28 bsAbs to optimize efficacy and sCEACAM5 tolerance

[0779] Based on the above findings, it was desired to use the 1+1 format for its efficacy, while tuning the CEACAM5 binding affinity to optimize efficacy and sCEACAM5 tolerance. Accordingly, CEACAM5 x CD28 bsAbs in the 1+1 Fab-scFv-Fc format were engineered with affinity-engineered humanized CEACAM5 binding domains described in Example X. In various experiments, HPAF-II tumor cells were incubated with purified T cells and CEACAM5 x CD28 bsAbs having a CEACAM5 affinity ladder, 1 μg/ml B7H3 x CD3, and with or without 1 μg/ml sCEACAM5. IL2 secretion was assessed after 24 hours, data depicted in FIGS. 57-60. Collectively, the data confirm that increased CEACAM5 affinity correlates with increased potency but also sCEACAM5 dependent IL-2 release blockade. Notably, variants were engineered with −15 nM binding affinity for CEACAM5 which enabled optimized efficacy and sCEACAM5 tolerance.

### 9E: Further Tuning CD28 Binding Affinity

[0780] CEACAM5 x CD28 bsAbs having either high affinity 26 nM or low affinity 130 nM CD28 binding domains were incubated with MKN-45 (CEA^{high}) or Lovo (CEACAM51° ^{W}) cells at 1:1 effector:target ratio with 1 μg/ml B7H3 x CD3. IL2 secretion was measured after 6 and 24 hours, data for which are depicted in FIG. 61. XENP45915 having 26 nM CD28 binding affinity was more active at 6 hours and 24 hours in comparison to XENP44915 having 130 nM CD28 binding affinity. However as depicted in FIG. 61B, at 24 hours, the more potent XENP45915 a hooking effect which is especially pronounced on high density tumor cells.

[0781] Dose escalation CEA x CD28 bsAb XENP44915 having low affinity 130 nM CD28 binding domain were incubated with MKN45 (CEA^{high}), HPAF-II (CEA^{high}), LS1034 (CEA^{med}), LS174T (CEA^{med}), Lovo (CEA^{med}), and HT29 (CEA° ⁰) cells at 1:1 effector:target ratio and 1 μg/ml illustrative B7H3 x CD3 bsAb IL2 secretion was measured after 24 hours as depicted in FIG. 68 and demonstrate that XENP44915 require CEA expression levels (e.g. med-high) representative of tumors for activity.

[0782] Dose escalation CEA x CD28 bsAb XENP44915 having low affinity 130 nM CD28 binding domain were incubated with HPAF-II cells and 0.1 or 1 μg/ml illustrative B7H3 x CD3 bsAb and dose escalation of CEA x CD28 XENP44915. The data in FIG. 69A-69B showing T cell activation and tumor cell killing demonstrate that CEA x CD28 synergizes with high and low concentrations of T-cell engager.

### Example 10: CEACAM5 x CD28 bsAb Combine Productively with PD1 Blockade

[0783] Checkpoint blockade (e.g. PD-1 blockade) may be a useful therapeutic modality to stack with engagement of T cell costimulatory receptors on TILs with agonistic antibodies as it would provide broad utility in solid tumors and circumvent CTLA4 inhibition of CD28 pathway. Accordingly, the combination of CEACAM5 x CD28 bispecific antibodies XENP44915 and XENP45560 with XENP16432 (a bivalent anti-PD-1 mAb based on the variable regions of nivolumab) was investigated. Dose titration of CEACAM5 x CD28 bsAb were incubated with illustrative PD-1 mAb and LS1304 cancer cells at 10:1 effector:target ratio. IL2 secretion after 24 hours are depicted in FIG. 62, and show that combining CEACAM5 x CD28 bsAb combines productively with PD-1 blockade.

### Example 11: CEA x CD28 Promotes T-Cell Activation by TCR-pMHC Recognition

[0784] A431-02M-null cells stably expressing CEACAM5 were engineered to express a CMV-derived (HLA-A2/NLVa) or a melanoma-derived (HLA-A2/G209; negative control) pMHC antigenic complex. Cells were cocultured with PBMCs from an HLA-A2⁺, CMV-seropositive donor, and treated with a dose titration of CEACAM5 x CD28 mAb. Data showing IL2 secretion is depicted in FIG. 67.

### Example 12: Attenuating CEACAM8 Cross-Reactivity

[0785] The CEA-A binding domain exhibits CEACAM8 cross-reactivity. Notably as depicted in Figure X, while humanizing the CEA-A binding domain reduces CEACAM5 binding affinity, CEACAM8 binding affinity is also reduced (see Octet sensorgram as depicted in FIG. 79). However, in restoring CEACAM5 binding affinity as in H1.7_L2.15, some CEACAM8 affinity is also restored. Accordingly, H1.7_L2.15 were further engineered with substitutions in the variable heavy and/or variable light domain. FIG. 80 depicts binding affinity of illustrative such further variants and show that CEA-A_H1.13_L2.15 maintained similar CEACAM5 affinity as H1.7_L2.15 along with drastically reduced CEACAM8 affinity.

[0786] To confirm that the new CEACAM8 affinity reduced variants retained CEACAM5 dependent functional activity and tolerance to shed CEA, 8K HPAF-II or LS174T tumor cells were seeded, and after 24 hours, mixed with purified T cells at 1:1 effector:target ratio and incubated with dose escalation of CEA x CD28 and 1 μg/mL illustrative B7H3 x CD3 bsAb with or without 1 μg/mL sCEA for 24 hour at 37° C. Cell supernatants were assayed for IL2 release, data for which are depicted in Figure X, confirming that the new CEACAM8 affinity-reduced variants retained CEACAM5 dependent functional activity and tolerance to shed CEA.

### Example 13: Further Characterizing CEACAM5 x CD28 bsAbs

[0787] As shown in the foregoing examples, the CEA-A binding domain is more active than other CEA binding domain investigated, and the H1.13_L2.15 variant has an affinity that balances potency and sCEA tolerance with attenuated CEACAM8 cross-reactivity. As noted in Example 9E, CEACAM5 x CD28 bsAbs having different CD28 affinities were both active in vivo, albeit XENP45915 having 26 nM CD28 binding affinity was more active in comparison to XENP44915 having 130 nM CD28 binding affinity. Thus on the one hand, 26 nM CD28 may potentially be more active with TCR-pMHC Signal 1, more active with reduced CD28 expression (e.g. tumor infiltrating lymphocytes), and more active on CEA-low tumors; on the other hand, 130 nM CD28 may potentially be less active on CEA+ normal tissues and this lower potency may allow higher dose levels to be reached, overcoming any TMDD. Accordingly, this section further characterize CEACAM5 x CD28 bsAbs having the CEA-A H1.13_L2.15 binding domain in combination with the 26 nM or 130 nM CD28 binding domains (respectively XENP46322 and XENP45906).

13A: Both XENP46322 and XENP45906 Require Similar Threshold CEACAM5 densities for activity corresponding to CEA densities found in CRC patients

[0788] 8K tumor cells having a range of CEACAM5 densities were seeded. After 24 hours, the tumor cells were mixed with purified T cells at a 1:1 effector:target ratio and incubated with varying concentration of XENP46322 or XENP45906 and 1 μg/ml illustrative EpCAM x CD3 bsAb for 24 hour at 37° C. Cell supernatant was assayed for IL2 release, data for which are depicted in FIG. 72.

### 13B: Both XENP46322 and XENP45906 Potentiate CD3 T Cell Engager Induced Cytotoxicity

[0789] In a first experiment, 20K tumor cells (LS-174T or Lovo) were mixed with purified T cells at a 1:1 effector:target ratio and incubated with dose titration of illustrative B7H3 x CD3 bsAb and fixed 1 μg/mL concentration of CEA x CD28 for 48 hours at 37° C. Cells were stained with Zombie Aqua flow Ab for 45 minutes at 4° C. followed by fixation and analysis by FACS, data for which are depicted in FIG. 73.

[0790] In another experiment, HPAF-II were co-cultured with purified T cells and either EpCAM x CD3 only or in combination with CEACAM5 x CD28 bsAbs. Cell growth was assessed using xCELLigence, data for which are depicted in FIG. 74.

[0791] Collectively, the data show that both XENP46322 and XENP45906 potentiate activity of various CD3 T cell engager and induce cytotoxicity.

13C: Both XENP46322 and XENP45906 Function in Synergy with TCR-pMHC Signal 1 and Combine with PD1 Blockade

[0792] 20K A431 B2M KO PGK-NLV CEA knock-in cells were seeded. After 24 hours, the cells were mixed with purified CMV reactive T cells at 10:1 effector:target ratio and incubated with varying concentrations of CEACAM5 x CD28 bsAbs alone or in combination with anti-PD1. Cell supernatant ere assayed for IL2 release, data for which are depicted in FIG. 75.

13D: Both XENP46322 and XENP45906 have Similar Tolerance to Soluble CEA

[0793] 8K HPAF-II cells were seeded, and after 24 hours, mixed with purified T cells at 1:1 effector:target ratio and incubated with dose titration of CEACAM5 x CD28 bsAb and 1 μg/ml illustrative B7H3 x CD3, with and without, soluble human CEA for 24 hour at 37° C. Cell supernatants were assayed for IL2, data for which are depicted in FIG. 76.

### 13E: Both XENP46322 and XENP45906 Mediate Anti-Tumor Response and T Cell Expansion In Vivo

[0794] NSG mice that were MHC I/II-DKO (NSG-DKO) and thus resistant to GVHD were used. NSG-DKO mice (8 or 10 per group) were intradermally inoculated with 1×10⁶ HPAFII cells on Day −14. Mice were then intraperitoneally injected with 5×10⁶ human PBMCs and treated with the indicated test articles/test article combinations on Day 0, and further treated with the indicated test articles on Days 7, 14, 21, and 28. Tumor volumes were monitored by caliper measurements once to three times per week, data for which are shown (days post 1^{st} dose) in Figures X-Y Blood was drawn weekly and analyzed by flow cytometry to count expansion of human lymphocytes, data for which are shown in Figure X.

[0795] The data show that each of the CEACAM5 x CD28 bsAbs demonstrated anti-tumor activity in combination with EpCAM x CD3 bsAb. Notably, higher dose XENP46322 saw an inverse dose response suggesting overactivation of T cells by the higher affinity CD28 binding domain.

[0796] All cited references are herein expressly incorporated by reference in their entirety.

[0797] Whereas particular embodiments of the invention have been described above for purposes of illustration, it will be appreciated by those skilled in the art that numerous variations of the details may be made without departing from the invention as described in the appended claims.

The application's sequence listing, which the Patent Office published only in electronic form, follows.

SEQUENCE LISTING (2685 sequences)

SEQ ID NO: 1 - protein, 220 aa, Homo sapiens
  source 1..220: note = sp|P10747|CD28_HUMAN T-cell-specific surface glycoprotein CD28 OS=Homo sapiens OX=9606 GN=CD28 PE=1 SV=1
MLRLLLALNLFPSIQVTGNKILVKQSPMLVAYDNAVNLSCKYSYNLFSREFRASLHKGLDSAVEVCVVYGNYSQQLQVYSKTGFNCDGKLGNESVTFYLQNLYVNQTDIYFCKIEVMYPPPYLDNEKSNGTIIHVKGKHLCPSPLFPGPSKPFWVLVVVGGVLACYSLLVTVAFIIFWVRSKRSRLLHSDYMNMTPRRPGPTRKHYQPYAPPRDFAAYRS

SEQ ID NO: 2 - protein, 134 aa, Homo sapiens
  source 1..134: note = sp|P10747|19-152
NKILVKQSPMLVAYDNAVNLSCKYSYNLFSREFRASLHKGLDSAVEVCVVYGNYSQQLQVYSKTGFNCDGKLGNESVTFYLQNLYVNQTDIYFCKIEVMYPPPYLDNEKSNGTIIHVKGKHLCPSPLFPGPSKP

SEQ ID NO: 3 - protein, 218 aa, Mus musculus
  source 1..218: note = sp|P31041|CD28_MOUSE T-cell-specific surface glycoprotein CD28 OS=Mus musculus OX=10090 GN=Cd28 PE=1; SV = 2
MTLRLLFLALNFFSVQVTENKILVKQSPLLVVDSNEVSLSCRYSYNLLAKEFRASLYKGVNSDVEVCVGNGNFTYQPQFRSNAEFNCDGDFDNETVTFRLWNLHVNHTDIYFCKIEFMYPPPYLDNERSNGTIIHIKEKHLCHTQSSPKLFWALVVVAGVLFCYGLLVTVALCVIWTNSRRNRLLQSDYMNMTPRRPGLTRKPYQPYAPARDFAAYRP

SEQ ID NO: 4 - protein, 131 aa, Mus musculus
  source 1..131: note = sp|P31041|20-150
NKILVKQSPLLVVDSNEVSLSCRYSYNLLAKEFRASLYKGVNSDVEVCVGNGNFTYQPQFRSNAEFNCDGDFDNETVTFRLWNLHVNHTDIYFCKIEFMYPPPYLDNERSNGTIIHIKEKHLCHTQSSPKL

SEQ ID NO: 5 - protein, 220 aa, Macaca fascicularis
  source 1..220: note = tr|Q0PDN3|Q0PDN3_MACFA CD28 OS=Macaca fascicularis; OX = 9541 GN=CD28 PE=2 SV=1
MLRLLLALNLLPSIQVTGNKILVKQSPMLVAYDNAVNLSCKYSYNLFSREFRASLHKGLDSAVEVCVVYGNYSQQLQVYSKTGFNCDGKLGNESVTFYLQNLYVNQTDIYFCKIEVMYPPPYLDNEKSNGTIIHVKGKHLCPSPLFPGPSKPFWALVVVGGVLACYSLLVTVAFCIFWMRSKRSRLLHSDYMNMTPRRPGPTRKHYQPYAPPRDFAAYRS

SEQ ID NO: 6 - protein, 134 aa, Macaca fascicularis; identical to SEQ ID NO: 2
  source 1..134: note = tr|Q0PDN3|19-152

SEQ ID NO: 7 - protein, 584 aa, Macaca fascicularis
  source 1..584: note = XP_015308533.1 PREDICTED: CD276 antigen isoform X1 [Macaca fascicularis]
MKLSSDHVFPLFRKLQWLPAAFRIQFTPVSPSAGAAFHHGEPSCQLPHSKMLHRRGSPGMGVHVGAALGALWFCLTGALEVQVPEDPVVALVGTDATLRCSFSPEPGFSLAQLNLIWQLTDTKQLVHSFTEGRDQGSAYANRTALFLDLLAQGNASLRLQRVRVADEGSFTCFVSIRDFGSAAVSLQVAAPYSKPSMTLEPNKDLRPGDTVTITCSSYRGYPEAEVFWQDGQGAPLTGNVTTSQMANEQGLFDVHSVLRVVLGANGTYSCLVRNPVLQQDAHGSITITPQRSPTGAVEVQVPEDPVVALVGTDATLRCSFSPEPGFSLAQLNLIWQLTDTKQLVHSFTEGRDQGSAYANRTALFLDLLAQGNASLRLQRVRVADEGSFTCFVSIRDFGSAAVSLQVAAPYSKPSMTLEPNKDLRPGDTVTITCSSYRGYPEAEVFWQDGQGAPLTGNVTTSQMANEQGLFDVHSVLRVVLGANGTYSCLVRNPVLQQDAHGSVTITGQPMTFPPEALWVTVGLSVCLVALLVALAFVCWRKIKQSCEEENAGAEDQDGEGEGSKTALQPLKHSDSKEDDGQELA

SEQ ID NO: 8 - protein, 438 aa, Macaca fascicularis
  source 1..438: note = XP_015308533.1|79-516
LEVQVPEDPVVALVGTDATLRCSFSPEPGFSLAQLNLIWQLTDTKQLVHSFTEGRDQGSAYANRTALFLDLLAQGNASLRLQRVRVADEGSFTCFVSIRDFGSAAVSLQVAAPYSKPSMTLEPNKDLRPGDTVTITCSSYRGYPEAEVFWQDGQGAPLTGNVTTSQMANEQGLFDVHSVLRVVLGANGTYSCLVRNPVLQQDAHGSITITPQRSPTGAVEVQVPEDPVVALVGTDATLRCSFSPEPGFSLAQLNLIWQLTDTKQLVHSFTEGRDQGSAYANRTALFLDLLAQGNASLRLQRVRVADEGSFTCFVSIRDFGSAAVSLQVAAPYSKPSMTLEPNKDLRPGDTVTITCSSYRGYPEAEVFWQDGQGAPLTGNVTTSQMANEQGLFDVHSVLRVVLGANGTYSCLVRNPVLQQDAHGSVTITGQPMTFPPEA

SEQ ID NO: 9 - protein, 339 aa, Homo sapiens
  source 1..339: note = sp|Q9UHE8|STEA1_HUMAN Metalloreductase STEAP1; OS = Homo sapiens OX=9606
MESRKDITNQEELWKMKPRRNLEEDDYLHKDTGETSMLKRPVLLHLHQTAHADEFDCPSELQHTQELFPQWHLPIKIAAIIASLTFLYTLLREVIHPLATSHQQYFYKIPILVINKVLPMVSITLLALVYLPGVIAAIVQLHNGTKYKKFPHWLDKWMLTRKQFGLLSFFFAVLHAIYSLSYPMRRSYRYKLLNWAYQQVQQNKEDAWIEHDVWRMEIYVSLGIVGLAILALLAVTSIPSVSDSLTWREFHYIQSKLGIVSLLLGTIHALIFAWNKWIDIKQFVWYTPPTFMIAVFLPIVVLIFKSILFLPCLRKKILKIRHGWEDVTKINKTEICSQL

SEQ ID NO: 10 - protein, 339 aa, Mus musculus
  source 1..339: note = sp|Q9CWR7|STEA1_MOUSE Metalloreductase STEAP1 OS=Mus musculus OX=10090
MEISDDVTNPEQLWKMKPKGNLEDDSYSTKDSGETSMLKRPGLSHLQHAVHVDAFDCPSELQHTQEFFPNWRLPVKVAAIISSLTFLYTLLREIIYPLVTSREQYFYKIPILVINKVLPMVAITLLALVYLPGELAAVVQLRNGTKYKKFPPWLDRWMLARKQFGLLSFFFAVLHAVYSLSYPMRRSYRYKLLNWAYKQVQQNKEDAWVEHDVWRMEIYVSLGIVGLAILALLAVTSIPSVSDSLTWREFHYIQSKLGIVSLLLGTVHALVFAWNKWVDVSQFVWYMPPTFMIAVFLPTLVLICKIALCLPCLRKKILKIRCGWEDVSKINRTEMASRL

SEQ ID NO: 11 - protein, 702 aa, Homo sapiens
  source 1..702: note = sp|P06731|CEAM5_HUMAN Carcinoembryonic antigen-related cell adhesion molecule 5 OS=Homo sapiens; OX = 9606 GN=CEACAM5 PE=1 SV=4
MESPSAPPHRWCIPWQRLLLTASLLTFWNPPTTAKLTIESTPFNVAEGKEVLLLVHNLPQHLFGYSWYKGERVDGNRQIIGYVIGTQQATPGPAYSGREIIYPNASLLIQNIIQNDTGFYTLHVIKSDLVNEEATGQFRVYPELPKPSISSNNSKPVEDKDAVAFTCEPETQDATYLWWVNNQSLPVSPRLQLSNGNRTLTLFNVTRNDTASYKCETQNPVSARRSDSVILNVLYGPDAPTISPLNTSYRSGENLNLSCHAASNPPAQYSWFVNGTFQQSTQELFIPNITVNNSGSYTCQAHNSDTGLNRTTVTTITVYAEPPKPFITSNNSNPVEDEDAVALTCEPEIQNTTYLWWVNNQSLPVSPRLQLSNDNRTLTLLSVTRNDVGPYECGIQNELSVDHSDPVILNVLYGPDDPTISPSYTYYRPGVNLSLSCHAASNPPAQYSWLIDGNIQQHTQELFISNITEKNSGLYTCQANNSASGHSRTTVKTITVSAELPKPSISSNNSKPVEDKDAVAFTCEPEAQNTTYLWWVNGQSLPVSPRLQLSNGNRTLTLFNVTRNDARAYVCGIQNSVSANRSDPVTLDVLYGPDTPIISPPDSSYLSGANLNLSCHSASNPSPQYSWRINGIPQQHTQVLFIAKITPNNNGTYACFVSNLATGRNNSIVKSITVSASGTSPGLSAGATVGIMIGVLVGVALI

SEQ ID NO: 12 - protein, 947 aa, Mus musculus
  source 1..947: note = sp|Q3UKK2|CEAM5_MOUSE Carcinoembryonic antigen-related cell adhesion molecule 5 OS=Mus musculus; OX = 10090 GN=Ceacam5 PE=2 SV=1
MEASSVLPCKWCTHLQGLLLTASFLTCCHLPTTAQITIELEPPQVIEGENVLIRVNNLTENLITLAWFRGMRIKSPQIGQYTPATKVTVLGPGHSGRETLYSNGSLQIYNVTQEDIGFYSLRIINKHAEIVSITSIYLNVYSSLWTCEHPSPHAKLTIESVPPGISEGGSVLLLVKNLPQNLLSLFWYKGVIAVKKFEIARHIKATNSSVPGPAHTGRETVFSNGSLLLQEVMQSDTGFYTLRTMSTDLKDEVAHVQLYMDTYLLTCYHPLQVKIESLPQNVAVGKTVLLLVHNLPEDFQAFFWYKSAYRRDTYKIAEYKRAMDATILGSAYSSREFIYNNGSMLIIDVTEDDAGYFLLEILREDLKIEKAYIQLHVNSFVSNSKDSASTARLSIESVPPSIVEGGSVLLLVHNLPKNLQSLFWYKGMIAEKKSELIQHIIATSSSLPGPAHSGRETVYNNGSLLLQRVMQNDTQFYTLQTMDTDLKYEVAHVQLQLDTSLSTWYHPLQVKIESLPRNVAVGKSVLFLVHNFPEVFRAFSWYKPAYKSHTSKIVEYHRFTDSATVGAAYRGIEVIFTNGSMVMIDVTEDDAGFYMLEILREDFKVEKAYVQLHVNSFVPNSKVSVSTARLSIESVPPSIVGGESVLLLVHNLPKNLQSLFWYKGVIAEEKSELIQHIIATSSSLPGPAHSGRETVYSNGSLLLQRVMQNDTGFYTLLTMSTDLKDEIAHVQLQLDTSTCCSLLTSDQLIIVPVPRNIAVGKSVLLLVCNVPKDVQTIFWYKSVYRTDIFKIAEYSRSMESTIWGLAHSGKEMVYTNGSLLIQNVTEHDAGLYMLEILHKDYKLERAHVQVHVNNPVSWPFVRVTDTTVRVQSSVVFTCFSADPGVSIRWLFNKQSLQLTERMTLSPSKCQLSIDPVWREDAGKYQCEVSNPVSSKSSLPVRLAVIEE

SEQ ID NO: 13 - protein, 705 aa, Macaca fascicularis
  source 1..705: note = XP_005589491.2 carcinoembryonic antigen-related cell adhesion molecule 5 isoform X1 [Macaca fascicularis]
MGSPSAPLHRWCIPWQTLLLTASLLTFWNPPTTAQLTIESRPFNVAEGKEVLLLAHNVSQNLFGYIWYKGERVDASRRIGSCVIRTQQITPGPAHSGRETIDFNASLLIHNVTQSDTGSYTIQVIKEDLVNEEATGQFRVYPELPKPYISSNNSNPVEDKDAVALTCEPETQDTTYLWWVNNQSLPVSPRLELSSDNRTLTVFNIPRNDTTSYKCETQNPVSVRRSDPVTLNVLYGPDAPTISPLNTPYRAGENLNLSCHAASNPAAQYSWFVNGTFQQSTQELFIPNITVNNSGSYMCQAHNSATGLNRTTVTAITVYAELPKPYITSNNSNPIEDKDAVTLTCEPETQDTTYLWWVNNQSLSVSSRLELSNDNRTLTVFNIPRNDTTFYECETQNPVSVRRSDPVTLNVLYGPDAPTISPLNTPYRAGENLNLSCHAASNPAAQYSWFVNGTFQQSTQELFIPNITVNNSGSYMCQAHNSATGLNRTTVTAITVYVELPKPYISSNNSNPIEDKDAVTLTCEPVAENTTYLWWVNNQSLSVSPRLQLSNGNRILTLLSVTRNDTGPYECGIQNSESAKRSDPVTLNVTYGPDTPIISPPDLSYRSGANLNLSCHSDSNPSPQYSWLINGTLRQHTQVLFISKITSNNNGAYACFVSNLATGRNNSIVKNISVSSGDSAPGSSGLSARATVGIIIGMLVGVALM

SEQ ID NO: 14 - protein, 15 aa, synthetic construct
GGGGSGGGGSGGGGS

SEQ ID NO: 15 - protein, 18 aa, synthetic construct
GSTSGSGKPGSGEGSTKG

SEQ ID NO: 16 - protein, 14 aa, synthetic construct
IRPRAIGGSKPRVA

SEQ ID NO: 17 - protein, 15 aa, synthetic construct
GKGGSGKGGSGKGGS

SEQ ID NO: 18 - protein, 15 aa, synthetic construct
GGKGSGGKGSGGKGS

SEQ ID NO: 19 - protein, 15 aa, synthetic construct
GGGKSGGGKSGGGKS

SEQ ID NO: 20 - protein, 15 aa, synthetic construct
GKGKSGKGKSGKGKS

SEQ ID NO: 21 - protein, 15 aa, synthetic construct
GGGKSGGKGSGKGGS

SEQ ID NO: 22 - protein, 15 aa, synthetic construct
GKPGSGKPGSGKPGS

SEQ ID NO: 23 - protein, 20 aa, synthetic construct
GKGKSGKGKSGKGKSGKGKS

SEQ ID NO: 24 - protein, 20 aa, synthetic construct
GKPGSGKPGSGKPGSGKPGS

SEQ ID NO: 25 - protein, 20 aa, synthetic construct
GGGGSGGGGSGGGGSGGGGS

SEQ ID NO: 26 - protein, 14 aa, synthetic construct
STAGDTHLGGEDFD

SEQ ID NO: 27 - protein, 15 aa, synthetic construct
GEGGSGEGGSGEGGS

SEQ ID NO: 28 - protein, 15 aa, synthetic construct
GGEGSGGEGSGGEGS

SEQ ID NO: 29 - protein, 15 aa, synthetic construct
GGGESGGGESGGGES

SEQ ID NO: 30 - protein, 15 aa, synthetic construct
GEGESGEGESGEGES

SEQ ID NO: 31 - protein, 15 aa, synthetic construct
GGGESGGEGSGEGGS

SEQ ID NO: 32 - protein, 20 aa, synthetic construct
GEGESGEGESGEGESGEGES

SEQ ID NO: 33 - protein, 19 aa, synthetic construct
PRGASKSGSASQTGSAPGS

SEQ ID NO: 34 - protein, 19 aa, synthetic construct
GTAAAGAGAAGGAAAGAAG

SEQ ID NO: 35 - protein, 19 aa, synthetic construct
GTSGSSGSGSGGSGSGGGG

SEQ ID NO: 36 - protein, 5 aa, synthetic construct
GGGGS

SEQ ID NO: 37 - protein, 10 aa, synthetic construct
GGGGSGGGGS

SEQ ID NO: 38 - protein, 25 aa, synthetic construct
GGGGSGGGGSGGGGSGGGGSGGGGS

SEQ ID NO: 39 - protein, 30 aa, synthetic construct
GGGGSGGGGSGGGGSGGGGSGGGGSGGGGS

SEQ ID NO: 40 - protein, 35 aa, synthetic construct
GGGGSGGGGSGGGGSGGGGSGGGGSGGGGSGGGGS

SEQ ID NO: 41 - protein, 5 aa, synthetic construct
GGGGA

SEQ ID NO: 42 - protein, 10 aa, synthetic construct
GGGGAGGGGA

SEQ ID NO: 43 - protein, 15 aa, synthetic construct
GGGGAGGGGAGGGGA

SEQ ID NO: 44 - protein, 20 aa, synthetic construct
GGGGAGGGGAGGGGAGGGGA

SEQ ID NO: 45 - protein, 25 aa, synthetic construct
GGGGAGGGGAGGGGAGGGGAGGGGA

SEQ ID NO: 46 - protein, 30 aa, synthetic construct
GGGGAGGGGAGGGGAGGGGAGGGGAGGGGA

SEQ ID NO: 47 - protein, 35 aa, synthetic construct
GGGGAGGGGAGGGGAGGGGAGGGGAGGGGAGGGGA

SEQ ID NO: 48 - protein, 30 aa, synthetic construct
DPALVHQRPAPPGGGGSGGGGSGGGGSGGG

SEQ ID NO: 49 - protein, 5 aa, synthetic construct
GKPGS

SEQ ID NO: 50 - protein, 25 aa, synthetic construct
GKPGSGKPGSGKPGSGKPGSGKPGS

SEQ ID NO: 51 - protein, 30 aa, synthetic construct
GKPGSGKPGSGKPGSGKPGSGKPGSGKPGS

SEQ ID NO: 52 - protein, 5 aa, synthetic construct
GGGES

SEQ ID NO: 53 - protein, 15 aa, synthetic construct
EPKSCDKTHTCPPCP

SEQ ID NO: 54 - protein, 9 aa, synthetic construct
KTHTCPPCP

SEQ ID NO: 55 - protein, 15 aa, synthetic construct
EPKSSDKTHTCPPCP

SEQ ID NO: 56 - protein, 19 aa, synthetic construct
GGGGSGGGGSKTHTCPPCP

SEQ ID NO: 57 - protein, 19 aa, synthetic construct
GKPGSGKPGSKTHTCPPCP

SEQ ID NO: 58 - protein, 14 aa, synthetic construct
GKPGSKTHTCPPCP

SEQ ID NO: 59 - protein, 5 aa, synthetic construct
EPKSC

SEQ ID NO: 60 - protein, 15 aa, synthetic construct
EPKSCGGGGSGGGGS

SEQ ID NO: 61 - protein, 15 aa, synthetic construct
EPKSCGKPGSGKPGS

SEQ ID NO: 62 - protein, 10 aa, synthetic construct
EPKSCGKPGS

SEQ ID NO: 63 - protein, 216 aa, synthetic construct
  source 1..216: note = Heterodimeric Fc Backbone 1 monomer 1 (-)
APPVAGPSVFLFPPKPKDTLMISRTPEVTCVVVDVKHEDPEVKFNWYVDGVEVHNAKTKPREEEYNSTYRVVSVLTVLHQDWLNGKEYKCKVSNKALPAPIEKTISKAKGQPREPQVYTLPPSREEMTKNQVSLTCDVSGFYPSDIAVEWESDGQPENNYKTTPPVLDSDGSFFLYSKLTVDKSRWEQGDVFSCSVMHEALHNHYTQKSLSLSPGK

SEQ ID NO: 64 - protein, 216 aa, synthetic construct
  source 1..216: note = Heterodimeric Fc Backbone 1 monomer 2 (+)
APPVAGPSVFLFPPKPKDTLMISRTPEVTCVVVDVKHEDPEVKFNWYVDGVEVHNAKTKPREEQYNSTYRVVSVLTVLHQDWLNGKEYKCKVSNKALPAPIEKTISKAKGQPREPQVYTLPPSREQMTKNQVKLTCLVKGFYPSDIAVEWESNGQPENNYKTTPPVLDSDGSFFLYSKLTVDKSRWQQGNVFSCSVMHEALHNHYTQKSLSLSPGK

SEQ ID NO: 65 - protein, 216 aa, synthetic construct; identical to SEQ ID NO: 63
  source 1..216: note = Heterodimeric Fc Backbone 2 monomer 1 (-)

SEQ ID NO: 66 - protein, 216 aa, synthetic construct
  source 1..216: note = Heterodimeric Fc Backbone monomer 2 (+)
APPVAGPSVFLFPPKPKDTLMISRTPEVTCVVVDVKHEDPEVKFNWYVDGVEVHNAKTKPREEQYNSTYRVVSVLTVLHQDWLNGKEYKCKVSNKALPAPIEKTISKAKGQPREPQVYTLPPSREEMTKNQVKLTCLVKGFYPSDIAVEWESNGQPENNYKTTPPVLDSDGSFFLYSKLTVDKSRWQQGNVFSCSVMHEALHNHYTQKSLSLSPGK

SEQ ID NO: 67 - protein, 216 aa, synthetic construct
  source 1..216: note = Heterodimeric Fc Backbone 3 monomer 1 (-)
APPVAGPSVFLFPPKPKDTLMISRTPEVTCVVVDVKHEDPEVKFNWYVDGVEVHNAKTKPREEEYNSTYRVVSVLTVLHQDWLNGKEYKCKVSNKALPAPIEKTISKAKGQPREPQVYTLPPSREEMTKNQVSLTCEVSGFYPSDIAVEWESDGQPENNYKTTPPVLDSDGSFFLYSKLTVDKSRWEQGDVFSCSVMHEALHNHYTQKSLSLSPGK

SEQ ID NO: 68 - protein, 216 aa, synthetic construct; identical to SEQ ID NO: 66
  source 1..216: note = Heterodimeric Fc Backbone 3 monomer 2 (+)

SEQ ID NO: 69 - protein, 216 aa, synthetic construct
  source 1..216: note = Heterodimeric Fc Backbone 4 monomer 1 (-)
APPVAGPSVFLFPPKPKDTLMISRTPEVTCVVVDVKHEDPEVKFNWYVDGVEVHNAKTKPREEEYNSTYRVVSVLTVLHQDWLNGKEYKCKVSNKALPAPIEKTISKAKGQPREPQVYTLPPSREEMTENEVSLTCLVKGFYPSDIAVEWESDGQPENNYKTTPPVLDSDGSFFLYSKLEVDKSRWEQGDVFSCSVMHEALHNHYTQKSLSLSPGK

SEQ ID NO: 70 - protein, 216 aa, synthetic construct
  source 1..216: note = Heterodimeric Fc Backbone 4 monomer 2 (+)
APPVAGPSVFLFPPKPKDTLMISRTPEVTCVVVDVKHEDPEVKFNWYVDGVEVHNAKTKPREEQYNSTYRVVSVLTVLHQDWLNGKEYKCKVSNKALPAPIEKTISKAKGQPREPQVYTLPPSREEMTKNQVSLTCLVKGFYPSDIAVEWESNGQPENNYKTTPPVLDSKGSFFLYSKLTVDKSRWQQGNVFSCSVMHEALHNHYTQKSLSLSPGK

SEQ ID NO: 71 - protein, 216 aa, synthetic construct
  source 1..216: note = Heterodimeric Fc Backbone 5 monomer 1 (-)
APPVAGPSVFLFPPKPKDTLMISRTPEVTCVVVDVKHEDPEVKFNWYVDGVEVHNAKTKPREEEYNSTYRVVSVLTVLHQDWLNGKEYKCKVSNKALPAPIEKTISKAKGQPREPQVYTLPPSRDELTKNQVSLTCDVSGFYPSDIAVEWESDGQPENNYKTTPPVLDSDGSFFLYSKLTVDKSRWEQGDVFSCSVMHEALHNHYTQKSLSLSPGK

SEQ ID NO: 72 - protein, 216 aa, synthetic construct
  source 1..216: note = Heterodimeric Fc Backbone 5 monomer 2 (+)
APPVAGPSVFLFPPKPKDTLMISRTPEVTCVVVDVKHEDPEVKFNWYVDGVEVHNAKTKPREEQYNSTYRVVSVLTVLHQDWLNGKEYKCKVSNKALPAPIEKTISKAKGQPREPQVYTLPPSRDQLTKNQVKLTCLVKGFYPSDIAVEWESNGQPENNYKTTPPVLDSDGSFFLYSKLTVDKSRWQQGNVFSCSVMHEALHNHYTQKSLSLSPGK

SEQ ID NO: 73 - protein, 216 aa, synthetic construct
  source 1..216: note = Heterodimeric Fc Backbone 6 monomer 1 (-)
APPVAGPSVFLFPPKPKDTLMISRTPEVTCVVVDVKHEDPEVKFNWYVDGVEVHNAKTKPREEEYASTYRVVSVLTVLHQDWLNGKEYKCKVSNKALPAPIEKTISKAKGQPREPQVYTLPPSREEMTKNQVSLTCDVSGFYPSDIAVEWESDGQPENNYKTTPPVLDSDGSFFLYSKLTVDKSRWEQGDVFSCSVMHEALHNHYTQKSLSLSPGK

SEQ ID NO: 74 - protein, 216 aa, synthetic construct
  source 1..216: note = Heterodimeric Fc Backbone 6 monomer 2 (+)
APPVAGPSVFLFPPKPKDTLMISRTPEVTCVVVDVKHEDPEVKFNWYVDGVEVHNAKTKPREEQYASTYRVVSVLTVLHQDWLNGKEYKCKVSNKALPAPIEKTISKAKGQPREPQVYTLPPSREQMTKNQVKLTCLVKGFYPSDIAVEWESNGQPENNYKTTPPVLDSDGSFFLYSKLTVDKSRWQQGNVFSCSVMHEALHNHYTQKSLSLSPGK

SEQ ID NO: 75 - protein, 216 aa, synthetic construct
  source 1..216: note = Heterodimeric Fc Backbone 7 monomer 1 (-)
APPVAGPSVFLFPPKPKDTLMISRTPEVTCVVVDVKHEDPEVKFNWYVDGVEVHNAKTKPREEEYSSTYRVVSVLTVLHQDWLNGKEYKCKVSNKALPAPIEKTISKAKGQPREPQVYTLPPSREEMTKNQVSLTCDVSGFYPSDIAVEWESDGQPENNYKTTPPVLDSDGSFFLYSKLTVDKSRWEQGDVFSCSVMHEALHNHYTQKSLSLSPGK

SEQ ID NO: 76 - protein, 216 aa, synthetic construct
  source 1..216: note = Heterodimeric Fc Backbone 7 monomer 2 (+)
APPVAGPSVFLFPPKPKDTLMISRTPEVTCVVVDVKHEDPEVKFNWYVDGVEVHNAKTKPREEQYSSTYRVVSVLTVLHQDWLNGKEYKCKVSNKALPAPIEKTISKAKGQPREPQVYTLPPSREQMTKNQVKLTCLVKGFYPSDIAVEWESNGQPENNYKTTPPVLDSDGSFFLYSKLTVDKSRWQQGNVFSCSVMHEALHNHYTQKSLSLSPGK

SEQ ID NO: 77 - protein, 217 aa, synthetic construct
  source 1..217: note = Heterodimeric Fc Backbone 8 monomer 1 (-)
APEFLGGPSVFLFPPKPKDTLMISRTPEVTCVVVDVSQEDPEVQFNWYVDGVEVHNAKTKPREEEFNSTYRVVSVLTVLHQDWLNGKEYKCKVSNKGLPSSIEKTISKAKGQPREPQVYTLPPSQEEMTKNQVSLTCDVSGFYPSDIAVEWESDGQPENNYKTTPPVLDSDGSFFLYSRLTVDKSRWEEGDVFSCSVMHEALHNHYTQKSLSLSLGK

SEQ ID NO: 78 - protein, 217 aa, synthetic construct
  source 1..217: note = Heterodimeric Fc Backbone 8 monomer 2 (+)
APEFLGGPSVFLFPPKPKDTLMISRTPEVTCVVVDVSQEDPEVQFNWYVDGVEVHNAKTKPREEQFNSTYRVVSVLTVLHQDWLNGKEYKCKVSNKGLPSSIEKTISKAKGQPREPQVYTLPPSQEQMTKNQVKLTCLVKGFYPSDIAVEWESNGQPENNYKTTPPVLDSDGSFFLYSRLTVDKSRWQEGNVFSCSVMHEALHNHYTQKSLSLSLGK

SEQ ID NO: 79 - protein, 216 aa, synthetic construct
  source 1..216: note = Heterodimeric Fc Backbone 9 monomer 1 (-)
APPVAGPSVFLFPPKPKDTLMISRTPEVTCVVVDVSHEDPEVQFNWYVDGVEVHNAKTKPREEEFNSTFRVVSVLTVVHQDWLNGKEYKCKVSNKGLPAPIEKTISKTKGQPREPQVYTLPPSREEMTKNQVSLTCDVSGFYPSDIAVEWESDGQPENNYKTTPPMLDSDGSFFLYSKLTVDKSRWEQGDVFSCSVMHEALHNHYTQKSLSLSPGK

SEQ ID NO: 80 - protein, 216 aa, synthetic construct
  source 1..216: note = Heterodimeric Fc Backbone 9 monomer 2 (+)
APPVAGPSVFLFPPKPKDTLMISRTPEVTCVVVDVSHEDPEVQFNWYVDGVEVHNAKTKPREEQFNSTFRVVSVLTVVHQDWLNGKEYKCKVSNKGLPAPIEKTISKTKGQPREPQVYTLPPSREQMTKNQVKLTCLVKGFYPSDIAVEWESNGQPENNYKTTPPMLDSDGSFFLYSKLTVDKSRWQQGNVFSCSVMHEALHNHYTQKSLSLSPGK

SEQ ID NO: 81 - protein, 216 aa, synthetic construct
  source 1..216: note = Heterodimeric Fc Backbone 10 monomer 1 (-)
APPVAGPSVFLFPPKPKDTLMISRTPEVTCVVVDVKHEDPEVQFNWYVDGVEVHNAKTKPREEEFNSTFRVVSVLTVVHQDWLNGKEYKCKVSNKGLPAPIEKTISKTKGQPREPQVYTLPPSREEMTKNQVSLTCDVSGFYPSDIAVEWESDGQPENNYKTTPPMLDSDGSFFLYSKLTVDKSRWEQGDVFSCSVMHEALHNHYTQKSLSLSPGK

SEQ ID NO: 82 - protein, 216 aa, synthetic construct
  source 1..216: note = Heterodimeric Fc Backbone 10 monomer 2 (+)
APPVAGPSVFLFPPKPKDTLMISRTPEVTCVVVDVKHEDPEVQFNWYVDGVEVHNAKTKPREEQFNSTFRVVSVLTVVHQDWLNGKEYKCKVSNKGLPAPIEKTISKTKGQPREPQVYTLPPSREQMTKNQVKLTCLVKGFYPSDIAVEWESNGQPENNYKTTPPMLDSDGSFFLYSKLTVDKSRWQQGNVFSCSVMHEALHNHYTQKSLSLSPGK

SEQ ID NO: 83 - protein, 216 aa, synthetic construct
  source 1..216: note = Heterodimeric Fc Backbone 11 monomer 1 (-)
APPVAGPSVFLFPPKPKDTLMISRTPEVTCVVVDVKHEDPEVKFNWYVDGVEVHNAKTKPREEEYNSTYRVVSVLTVLHQDWLNGKEYKCKVSNKALPAPIEKTISKAKGQPREPQVYTLPPSREEMTKNQVSLTCDVSGFYPSDIAVEWESDGQPENNYKTTPPVLDSDGSFFLYSKLTVDKSRWEQGDVFSCSVLHEALHSHYTQKSLSLSPGK

SEQ ID NO: 84 - protein, 216 aa, synthetic construct
  source 1..216: note = Heterodimeric Fc Backbone 11 monomer 2 (+)
APPVAGPSVFLFPPKPKDTLMISRTPEVTCVVVDVKHEDPEVKFNWYVDGVEVHNAKTKPREEQYNSTYRVVSVLTVLHQDWLNGKEYKCKVSNKALPAPIEKTISKAKGQPREPQVYTLPPSREQMTKNQVKLTCLVKGFYPSDIAVEWESNGQPENNYKTTPPVLDSDGSFFLYSKLTVDKSRWQQGNVFSCSVLHEALHSHYTQKSLSLSPGK

SEQ ID NO: 85 - protein, 216 aa, synthetic construct
  source 1..216: note = Heterodimeric Fc Backbone 12 monomer 1 (-)
APPVAGPSVFLFPPKPKDTLMISRTPEVTCVVVDVKHEDPEVKFKWYVDGVEVHNAKTKPREEQYNSTYRVVSVLTVLHQDWLNGKEYKCKVSNKALPAPIEKTISKAKGQPREPQVYTLPPSREQMTKNQVKLTCLVKGFYPSDIAVEWESNGQPENNYKTTPPVLDSDGSFFLYSKLTVDKSRWQQGNVFSCSVMHEALHNHYTQKSLSLSPGK

SEQ ID NO: 86 - protein, 216 aa, synthetic construct; identical to SEQ ID NO: 63
  source 1..216: note = Heterodimeric Fc Backbone 12 monomer 2 (+)

SEQ ID NO: 87 - protein, 216 aa, synthetic construct
  source 1..216: note = Heterodimeric Fc Backbone 13 monomer 1
APPVAGPSVFLFPPKPKDTLMISRTPEVTCVVVDVKHEDPEVKFNWYVDGVEVHNAKTKPREEEYNSTYRVVSVLTVLHQDWLNGKEYKCKVSNKALPAPIEKTISKAKGQPREPQVYTLPPSRDELTKNQVSLTCDVSGFYPSDIAVEWESDGQPENNYKTTPPVLDSDGSFFLYSKLTVDKSRWEQGDVFSCSVLHEALHSHYTQKSLSLSPGK

SEQ ID NO: 88 - protein, 216 aa, synthetic construct
  source 1..216: note = Heterodimeric Fc Backbone 13 monomer 2
APPVAGPSVFLFPPKPKDTLMISRTPEVTCVVVDVKHEDPEVKFNWYVDGVEVHNAKTKPREEQYNSTYRVVSVLTVLHQDWLNGKEYKCKVSNKALPAPIEKTISKAKGQPREPQVYTLPPSRDQLTKNQVKLTCLVKGFYPSDIAVEWESNGQPENNYKTTPPVLDSDGSFFLYSKLTVDKSRWQQGNVFSCSVLHEALHSHYTQKSLSLSPGK

SEQ ID NO: 89 - protein, 216 aa, synthetic construct
  source 1..216: note = Heterodimeric Fc Backbone 14 monomer 1
APPVAGPSVFLFPPKPKDTLMISRTPEVTCVVVDVKHEDPEVKFNWYVDGVEVHNAKTKPREEEYNSTYRVVSVLTVLHQDWLNGKEYKCKVSNKALPAPIEKTISKAKGQPREPQVYTLPPSREEMTKNQVSLTCDVSGFYPSDIAVEWESDGQPENNYKTTPPVLDSDGSFFLYSKLTVDKSRWEQGDVFSCSVLHEALHAHYTQKSLSLSPGK

SEQ ID NO: 90 - protein, 216 aa, synthetic construct
  source 1..216: note = Heterodimeric Fc Backbone 14 monomer 2
APPVAGPSVFLFPPKPKDTLMISRTPEVTCVVVDVKHEDPEVKFNWYVDGVEVHNAKTKPREEQYNSTYRVVSVLTVLHQDWLNGKEYKCKVSNKALPAPIEKTISKAKGQPREPQVYTLPPSREQMTKNQVKLTCLVKGFYPSDIAVEWESNGQPENNYKTTPPVLDSDGSFFLYSKLTVDKSRWQQGNVFSCSVLHEALHAHYTQKSLSLSPGK

SEQ ID NO: 91 - protein, 216 aa, synthetic construct
  source 1..216: note = Heterodimeric Fc Backbone 15 monomer 1
APPVAGPSVFLFPPKPKDTLMISRTPEVTCVVVDVKHEDPEVKFNWYVDGVEVHNAKTKPREEEYNSTYRVVSVLTVLHQDWLNGKEYKCKVSNKALPAPIEKTISKAKGQPREPQVYTLPPSRDELTKNQVSLTCDVSGFYPSDIAVEWESDGQPENNYKTTPPVLDSDGSFFLYSKLTVDKSRWEQGDVFSCSVLHEALHAHYTQKSLSLSPGK

SEQ ID NO: 92 - protein, 216 aa, synthetic construct
  source 1..216: note = Heterodimeric Fc Backbone 15 monomer 2
APPVAGPSVFLFPPKPKDTLMISRTPEVTCVVVDVKHEDPEVKFNWYVDGVEVHNAKTKPREEQYNSTYRVVSVLTVLHQDWLNGKEYKCKVSNKALPAPIEKTISKAKGQPREPQVYTLPPSRDQLTKNQVKLTCLVKGFYPSDIAVEWESNGQPENNYKTTPPVLDSDGSFFLYSKLTVDKSRWQQGNVFSCSVLHEALHAHYTQKSLSLSPGK

SEQ ID NO: 93 - protein, 216 aa, synthetic construct; identical to SEQ ID NO: 63
  source 1..216: note = 2 + 1 mAb-scFv Heterodimeric Fc Backbone monomer 1

SEQ ID NO: 94 - protein, 215 aa, synthetic construct
  source 1..215: note = 2 + 1 mAb-scFv Heterodimeric Fc Backbone monomer 2
APPVAGPSVFLFPPKPKDTLMISRTPEVTCVVVDVKHEDPEVKFNWYVDGVEVHNAKTKPREEQYNSTYRVVSVLTVLHQDWLNGKEYKCKVSNKALPAPIEKTISKAKGQPREPQVYTLPPSREQMTKNQVKLTCLVKGFYPSDIAVEWESNGQPENNYKTTPPVLDSDGSFFLYSKLTVDKSRWQQGNVFSCSVMHEALHNHYTQKSLSLSPG

SEQ ID NO: 95 - protein, 98 aa, synthetic construct
  source 1..98: note = IgG1 CH1(+)
ASTKGPSVFPLAPSSKSTSGGTAALGCLVKDYFPEPVTVSWNSGALTSGVHTFPAVLQSSGLYSLSSVVTVPSSSLGTQTYICNVNHKPSNTKVDKKV

SEQ ID NO: 96 - protein, 98 aa, synthetic construct
  source 1..98: note = IgG1 CH1(-)
ASTKGPSVFPLAPSSKSTSGGTAALGCLVKDYFPEPVTVSWNSGALTSGVHTFPAVLQSSGLYSLSSVVTVPSSSLGTQTYICNVNHKPSDTKVDKKV

SEQ ID NO: 97 - protein, 98 aa, synthetic construct
  source 1..98: note = IgG2 CH1(+)
ASTKGPSVFPLAPCSRSTSESTAALGCLVKDYFPEPVTVSWNSGALTSGVHTFPAVLQSSGLYSLSSVVTVPSSNFGTQTYTCNVDHKPSNTKVDKTV

SEQ ID NO: 98 - protein, 98 aa, synthetic construct
  source 1..98: note = IgG2 CH1(-)
ASTKGPSVFPLAPCSRSTSESTAALGCLVKDYFPEPVTVSWNSGALTSGVHTFPAVLQSSGLYSLSSVVTVPSSNFGTQTYTCNVDHKPSDTKVDKTV

SEQ ID NO: 99 - protein, 98 aa, synthetic construct
  source 1..98: note = IgG4 CH1(+)
ASTKGPSVFPLAPCSRSTSESTAALGCLVKDYFPEPVTVSWNSGALTSGVHTFPAVLQSSGLYSLSSVVTVPSSSLGTKTYTCNVDHKPSNTKVDKRV

SEQ ID NO: 100 - protein, 98 aa, synthetic construct
  source 1..98: note = IgG4 CH1(-)
ASTKGPSVFPLAPCSRSTSESTAALGCLVKDYFPEPVTVSWNSGALTSGVHTFPAVLQSSGLYSLSSVVTVPSSSLGTKTYTCNVDHKPSDTKVDKRV

SEQ ID NO: 101 - protein, 15 aa, synthetic construct
  source 1..15: note = IgG1 hinge
EPKSCDKTHTCPPCP

SEQ ID NO: 102 - protein, 12 aa, synthetic construct
  source 1..12: note = IgG2 hinge
ERKCCVECPPCP

SEQ ID NO: 103 - protein, 12 aa, synthetic construct
  source 1..12: note = IgG4 hinge
ESKYGPPCPSCP

SEQ ID NO: 104 - protein, 107 aa, synthetic construct [sequence omitted]

SEQ ID NO: 105 - protein, 106 aa, synthetic construct
  source 1..106: note = Light Chain Constant Domain - Lambda
GQPKAAPSVTLFPPSSEELQANKATLVCLISDFYPGAVTVAWKADSSPVKAGVETTTPSKQSNNKYAASSYLSLTPEQWKSHRSYSCQVTHEGSTVEKTVAPTECS

SEQ ID NO: 106 - protein, 121 aa, synthetic construct
  source 1..121: note = 1A7[CD28]_H1L1 Variable heavy (vh) domain
EVQLLESGGGLVQPGGSLRLSCAASGFTFSSYAMSWVRQAPGKGLEWVSTISGSGDSTYYADSVKGRFTISRDNSKNTLYLQMNSLRAEDTAVYYCAKSGPGLRQVGFDYWGQGTLVTVSS

SEQ ID NO: 107 - protein, 5 aa, synthetic construct
  source 1..5: note = 1A7[CD28]_H1L1 vhCDR1
SYAMS

SEQ ID NO: 108 - protein, 17 aa, synthetic construct
  source 1..17: note = 1A7[CD28]_H1L1 vhCDR2
TISGSGDSTYYADSVKG

SEQ ID NO: 109 - protein, 12 aa, synthetic construct
  source 1..12: note = 1A7[CD28]_H1L1 vhCDR3
SGPGLRQVGFDY

SEQ ID NO: 110 - protein, 107 aa, synthetic construct
  source 1..107: note = 1A7[CD28]_H1L1 Variable light (vl) domain
DIQMTQSPSSLSASVGDRVTITCRASQSISSYLNWYQQKPGKAPKLLIYAASSLQSGVPSRFSGSGSGTDFTLTISSLQPEDFATYYCQQSYSTPFTFGQGTKLEIK

SEQ ID NO: 111 - protein, 11 aa, synthetic construct
  source 1..11: note = 1A7[CD28]_H1L1 vlCDR1
RASQSISSYLN

SEQ ID NO: 112 - protein, 7 aa, synthetic construct
  source 1..7: note = 1A7[CD28]_H1L1 vlCDR2
AASSLQS

SEQ ID NO: 113 - protein, 9 aa, synthetic construct
  source 1..9: note = 1A7[CD28]_H1L1 vlCDR3
QQSYSTPFT

SEQ ID NO: 114 - protein, 450 aa, synthetic construct
  source 1..450: note = XENP28428 1A7[CD28]_H1L1_IgG1_PVA_/S267K Heavy Chain
EVQLLESGGGLVQPGGSLRLSCAASGFTFSSYAMSWVRQAPGKGLEWVSTISGSGDSTYYADSVKGRFTISRDNSKNTLYLQMNSLRAEDTAVYYCAKSGPGLRQVGFDYWGQGTLVTVSSASTKGPSVFPLAPSSKSTSGGTAALGCLVKDYFPEPVTVSWNSGALTSGVHTFPAVLQSSGLYSLSSVVTVPSSSLGTQTYICNVNHKPSNTKVDKKVEPKSCDKTHTCPPCPAPPVAGPSVFLFPPKPKDTLMISRTPEVTCVVVDVKHEDPEVKFNWYVDGVEVHNAKTKPREEQYNSTYRVVSVLTVLHQDWLNGKEYKCKVSNKALPAPIEKTISKAKGQPREPQVYTLPPSREEMTKNQVSLTCLVKGFYPSDIAVEWESNGQPENNYKTTPPVLDSDGSFFLYSKLTVDKSRWQQGNVFSCSVMHEALHNHYTQKSLSLSPGK

SEQ ID NO: 115 - protein, 214 aa, synthetic construct
  source 1..214: note = XENP28428 1A7[CD28]_H1L1_IgG1_PVA_/S267K Light Chain
DIQMTQSPSSLSASVGDRVTITCRASQSISSYLNWYQQKPGKAPKLLIYAASSLQSGVPSRFSGSGSGTDFTLTISSLQPEDFATYYCQQSYSTPFTFGQGTKLEIKRTVAAPSVFIFPPSDEQLKSGTASVVCLLNNFYPREAKVQWKVDNALQSGNSQESVTEQDSKDSTYSLSSTLTLSKADYEKHKVYACEVTHQGLSSPVTKSFNRGEC

SEQ ID NO: 116 - protein, 121 aa, synthetic construct
  source 1..121: note = 1A7[CD28]_H1.1
EVQLLESGGGLVQPGGSLRLSCAASGFTFSSYYMSWVRQAPGKGLEWVSTISGSGDSTYYADSVKGRFTISRDNSKNTLYLQMNSLRAEDTAVYYCAKSGPGLRQVGFDYWGQGTLVTVSS

SEQ ID NO: 117 - protein, 121 aa, synthetic construct
  source 1..121: note = 1A7[CD28]_H1.2
EVQLLESGGGLVQPGGSLRLSCAASGFTFSSYAMSWVRQAPGKGLEWVSTIDGSGDSTYYADSVKGRFTISRDNSKNTLYLQMNSLRAEDTAVYYCAKSGPGLRQVGFDYWGQGTLVTVSS

SEQ ID NO: 118 - protein, 121 aa, synthetic construct
  source 1..121: note = 1A7[CD28]_H1.3
EVQLLESGGGLVQPGGSLRLSCAASGFTFSSYAMSWVRQAPGKGLEWVSTIEGSGDSTYYADSVKGRFTISRDNSKNTLYLQMNSLRAEDTAVYYCAKSGPGLRQVGFDYWGQGTLVTVSS

SEQ ID NO: 119 - protein, 121 aa, synthetic construct
  source 1..121: note = 1A7[CD28]_H1.4
EVQLLESGGGLVQPGGSLRLSCAASGFTFSSYAMSWVRQAPGKGLEWVSTIYGSGDSTYYADSVKGRFTISRDNSKNTLYLQMNSLRAEDTAVYYCAKSGPGLRQVGFDYWGQGTLVTVSS

SEQ ID NO: 120 - protein, 121 aa, synthetic construct
  source 1..121: note = 1A7[CD28]_H1.5
EVQLLESGGGLVQPGGSLRLSCAASGFTFSSYAMSWVRQAPGKGLEWVSTISDSGDSTYYADSVKGRFTISRDNSKNTLYLQMNSLRAEDTAVYYCAKSGPGLRQVGFDYWGQGTLVTVSS

SEQ ID NO: 121 - protein, 121 aa, synthetic construct
  source 1..121: note = 1A7[CD28]_H1.6
EVQLLESGGGLVQPGGSLRLSCAASGFTFSSYAMSWVRQAPGKGLEWVSTISESGDSTYYADSVKGRFTISRDNSKNTLYLQMNSLRAEDTAVYYCAKSGPGLRQVGFDYWGQGTLVTVSS

SEQ ID NO: 122 - protein, 121 aa, synthetic construct
  source 1..121: note = 1A7[CD28]_H1.7
EVQLLESGGGLVQPGGSLRLSCAASGFTFSSYAMSWVRQAPGKGLEWVSTISGSGTSTYYADSVKGRFTISRDNSKNTLYLQMNSLRAEDTAVYYCAKSGPGLRQVGFDYWGQGTLVTVSS

SEQ ID NO: 123 - protein, 121 aa, synthetic construct
  source 1..121: note = 1A7[CD28]_H1.8
EVQLLESGGGLVQPGGSLRLSCAASGFTFSSYAMSWVRQAPGKGLEWVSTISGSGYSTYYADSVKGRFTISRDNSKNTLYLQMNSLRAEDTAVYYCAKSGPGLRQVGFDYWGQGTLVTVSS

SEQ ID NO: 124 - protein, 121 aa, synthetic construct
  source 1..121: note = 1A7[CD28]_H1.9
EVQLLESGGGLVQPGGSLRLSCAASGFTFSSYAMSWVRQAPGKGLEWVSTISGSGDYTYYADSVKGRFTISRDNSKNTLYLQMNSLRAEDTAVYYCAKSGPGLRQVGFDYWGQGTLVTVSS

SEQ ID NO: 125 - protein, 121 aa, synthetic construct
  source 1..121: note = 1A7[CD28]_H1.10
EVQLLESGGGLVQPGGSLRLSCAASGFTFSSYYMSWVRQAPGKGLEWVSTIDGSGDSTYYADSVKGRFTISRDNSKNTLYLQMNSLRAEDTAVYYCAKSGPGLRQVGFDYWGQGTLVTVSS

SEQ ID NO: 126 - protein, 121 aa, synthetic construct
  source 1..121: note = 1A7[CD28]_H1.11
EVQLLESGGGLVQPGGSLRLSCAASGFTFSSYYMSWVRQAPGKGLEWVSTIEGSGDSTYYADSVKGRFTISRDNSKNTLYLQMNSLRAEDTAVYYCAKSGPGLRQVGFDYWGQGTLVTVSS

SEQ ID NO: 127 - protein, 121 aa, synthetic construct
  source 1..121: note = 1A7[CD28]_H1.12
EVQLLESGGGLVQPGGSLRLSCAASGFTFSSYYMSWVRQAPGKGLEWVSTIYGSGDSTYYADSVKGRFTISRDNSKNTLYLQMNSLRAEDTAVYYCAKSGPGLRQVGFDYWGQGTLVTVSS

SEQ ID NO: 128 - protein, 121 aa, synthetic construct
  source 1..121: note = 1A7[CD28]_H1.13
EVQLLESGGGLVQPGGSLRLSCAASGFTFSSYYMSWVRQAPGKGLEWVSTISDSGDSTYYADSVKGRFTISRDNSKNTLYLQMNSLRAEDTAVYYCAKSGPGLRQVGFDYWGQGTLVTVSS

SEQ ID NO: 129 - protein, 121 aa, synthetic construct
  source 1..121: note = 1A7[CD28]_H1.14
EVQLLESGGGLVQPGGSLRLSCAASGFTFSSYYMSWVRQAPGKGLEWVSTISESGDSTYYADSVKGRFTISRDNSKNTLYLQMNSLRAEDTAVYYCAKSGPGLRQVGFDYWGQGTLVTVSS

SEQ ID NO: 130 - protein, 121 aa, synthetic construct
  source 1..121: note = 1A7[CD28]_H1.15
EVQLLESGGGLVQPGGSLRLSCAASGFTFSSYYMSWVRQAPGKGLEWVSTISGSGTSTYYADSVKGRFTISRDNSKNTLYLQMNSLRAEDTAVYYCAKSGPGLRQVGFDYWGQGTLVTVSS

SEQ ID NO: 131 - protein, 121 aa, synthetic construct
  source 1..121: note = 1A7[CD28]_H1.16
EVQLLESGGGLVQPGGSLRLSCAASGFTFSSYYMSWVRQAPGKGLEWVSTISGSGYSTYYADSVKGRFTISRDNSKNTLYLQMNSLRAEDTAVYYCAKSGPGLRQVGFDYWGQGTLVTVSS

SEQ ID NO: 132 - protein, 121 aa, synthetic construct
  source 1..121: note = 1A7[CD28]_H1.17
EVQLLESGGGLVQPGGSLRLSCAASGFTFSSYYMSWVRQAPGKGLEWVSTISGSGDYTYYADSVKGRFTISRDNSKNTLYLQMNSLRAEDTAVYYCAKSGPGLRQVGFDYWGQGTLVTVSS

SEQ ID NO: 133 - protein, 121 aa, synthetic construct
  source 1..121: note = 1A7[CD28]_H1.18
EVQLLESGGGLVQPGGSLRLSCAASGFTFSSYAMSWVRQAPGKGLEWVSTIDDSGDSTYYADSVKGRFTISRDNSKNTLYLQMNSLRAEDTAVYYCAKSGPGLRQVGFDYWGQGTLVTVSS

SEQ ID NO: 134 - protein, 121 aa, synthetic construct
  source 1..121: note = 1A7[CD28]_H1.19
EVQLLESGGGLVQPGGSLRLSCAASGFTFSSYAMSWVRQAPGKGLEWVSTIDESGDSTYYADSVKGRFTISRDNSKNTLYLQMNSLRAEDTAVYYCAKSGPGLRQVGFDYWGQGTLVTVSS

SEQ ID NO: 135 - protein, 121 aa, synthetic construct
  source 1..121: note = 1A7[CD28]_H1.20
EVQLLESGGGLVQPGGSLRLSCAASGFTFSSYAMSWVRQAPGKGLEWVSTIDGSGTSTYYADSVKGRFTISRDNSKNTLYLQMNSLRAEDTAVYYCAKSGPGLRQVGFDYWGQGTLVTVSS

SEQ ID NO: 136 - protein, 121 aa, synthetic construct
  source 1..121: note = 1A7[CD28]_H1.21
EVQLLESGGGLVQPGGSLRLSCAASGFTFSSYAMSWVRQAPGKGLEWVSTIDGSGYSTYYADSVKGRFTISRDNSKNTLYLQMNSLRAEDTAVYYCAKSGPGLRQVGFDYWGQGTLVTVSS

SEQ ID NO: 137 - protein, 121 aa, synthetic construct
  source 1..121: note = 1A7[CD28]_H1.22
EVQLLESGGGLVQPGGSLRLSCAASGFTFSSYAMSWVRQAPGKGLEWVSTIDGSGDYTYYADSVKGRFTISRDNSKNTLYLQMNSLRAEDTAVYYCAKSGPGLRQVGFDYWGQGTLVTVSS

SEQ ID NO: 138 - protein, 121 aa, synthetic construct
  source 1..121: note = 1A7[CD28]_H1.23
EVQLLESGGGLVQPGGSLRLSCAASGFTFSSYAMSWVRQAPGKGLEWVSTIEDSGDSTYYADSVKGRFTISRDNSKNTLYLQMNSLRAEDTAVYYCAKSGPGLRQVGFDYWGQGTLVTVSS

SEQ ID NO: 139 - protein, 121 aa, synthetic construct
  source 1..121: note = 1A7[CD28]_H1.24
EVQLLESGGGLVQPGGSLRLSCAASGFTFSSYAMSWVRQAPGKGLEWVSTIEESGDSTYYADSVKGRFTISRDNSKNTLYLQMNSLRAEDTAVYYCAKSGPGLRQVGFDYWGQGTLVTVSS

SEQ ID NO: 140 - protein, 121 aa, synthetic construct
  source 1..121: note = 1A7[CD28]_H1.25
EVQLLESGGGLVQPGGSLRLSCAASGFTFSSYAMSWVRQAPGKGLEWVSTIEGSGTSTYYADSVKGRFTISRDNSKNTLYLQMNSLRAEDTAVYYCAKSGPGLRQVGFDYWGQGTLVTVSS

SEQ ID NO: 141 - protein, 121 aa, synthetic construct
  source 1..121: note = 1A7[CD28]_H1.26
EVQLLESGGGLVQPGGSLRLSCAASGFTFSSYAMSWVRQAPGKGLEWVSTIEGSGYSTYYADSVKGRFTISRDNSKNTLYLQMNSLRAEDTAVYYCAKSGPGLRQVGFDYWGQGTLVTVSS

SEQ ID NO: 142 - protein, 121 aa, synthetic construct
  source 1..121: note = 1A7[CD28]_H1.27
EVQLLESGGGLVQPGGSLRLSCAASGFTFSSYAMSWVRQAPGKGLEWVSTIEGSGDYTYYADSVKGRFTISRDNSKNTLYLQMNSLRAEDTAVYYCAKSGPGLRQVGFDYWGQGTLVTVSS

SEQ ID NO: 143 - protein, 121 aa, synthetic construct
  source 1..121: note = 1A7[CD28]_H1.28
EVQLLESGGGLVQPGGSLRLSCAASGFTFSSYAMSWVRQAPGKGLEWVSTIYDSGDSTYYADSVKGRFTISRDNSKNTLYLQMNSLRAEDTAVYYCAKSGPGLRQVGFDYWGQGTLVTVSS

SEQ ID NO: 144 - protein, 121 aa, synthetic construct
  source 1..121: note = 1A7[CD28]_H1.29
EVQLLESGGGLVQPGGSLRLSCAASGFTFSSYAMSWVRQAPGKGLEWVSTIYESGDSTYYADSVKGRFTISRDNSKNTLYLQMNSLRAEDTAVYYCAKSGPGLRQVGFDYWGQGTLVTVSS

SEQ ID NO: 145 - protein, 121 aa, synthetic construct
  source 1..121: note = 1A7[CD28]_H1.30
EVQLLESGGGLVQPGGSLRLSCAASGFTFSSYAMSWVRQAPGKGLEWVSTIYGSGTSTYYADSVKGRFTISRDNSKNTLYLQMNSLRAEDTAVYYCAKSGPGLRQVGFDYWGQGTLVTVSS

SEQ ID NO: 146 - protein, 121 aa, synthetic construct
  source 1..121: note = 1A7[CD28]_H1.31
EVQLLESGGGLVQPGGSLRLSCAASGFTFSSYAMSWVRQAPGKGLEWVSTIYGSGYSTYYADSVKGRFTISRDNSKNTLYLQMNSLRAEDTAVYYCAKSGPGLRQVGFDYWGQGTLVTVSS

SEQ ID NO: 147 - protein, 121 aa, synthetic construct
  source 1..121: note = 1A7[CD28]_H1.32
EVQLLESGGGLVQPGGSLRLSCAASGFTFSSYAMSWVRQAPGKGLEWVSTIYGSGDYTYYADSVKGRFTISRDNSKNTLYLQMNSLRAEDTAVYYCAKSGPGLRQVGFDYWGQGTLVTVSS

SEQ ID NO: 148 - protein, 121 aa, synthetic construct
  source 1..121: note = 1A7[CD28]_H1.33
EVQLLESGGGLVQPGGSLRLSCAASGFTFSSYAMSWVRQAPGKGLEWVSTISDSGTSTYYADSVKGRFTISRDNSKNTLYLQMNSLRAEDTAVYYCAKSGPGLRQVGFDYWGQGTLVTVSS

SEQ ID NO: 149 - protein, 121 aa, synthetic construct
  source 1..121: note = 1A7[CD28]_H1.34
EVQLLESGGGLVQPGGSLRLSCAASGFTFSSYAMSWVRQAPGKGLEWVSTISDSGYSTYYADSVKGRFTISRDNSKNTLYLQMNSLRAEDTAVYYCAKSGPGLRQVGFDYWGQGTLVTVSS

SEQ ID NO: 150 - protein, 121 aa, synthetic construct
  source 1..121: note = 1A7[CD28]_H1.35
EVQLLESGGGLVQPGGSLRLSCAASGFTFSSYAMSWVRQAPGKGLEWVSTISDSGDYTYYADSVKGRFTISRDNSKNTLYLQMNSLRAEDTAVYYCAKSGPGLRQVGFDYWGQGTLVTVSS

SEQ ID NO: 151 - protein, 121 aa, synthetic construct
  source 1..121: note = 1A7[CD28]_H1.36
EVQLLESGGGLVQPGGSLRLSCAASGFTFSSYAMSWVRQAPGKGLEWVSTISESGTSTYYADSVKGRFTISRDNSKNTLYLQMNSLRAEDTAVYYCAKSGPGLRQVGFDYWGQGTLVTVSS

SEQ ID NO: 152 - protein, 121 aa, synthetic construct
  source 1..121: note = 1A7[CD28]_H1.37
EVQLLESGGGLVQPGGSLRLSCAASGFTFSSYAMSWVRQAPGKGLEWVSTISESGYSTYYADSVKGRFTISRDNSKNTLYLQMNSLRAEDTAVYYCAKSGPGLRQVGFDYWGQGTLVTVSS

SEQ ID NO: 153 - protein, 121 aa, synthetic construct
  source 1..121: note = 1A7[CD28]_H1.38
EVQLLESGGGLVQPGGSLRLSCAASGFTFSSYAMSWVRQAPGKGLEWVSTISESGDYTYYADSVKGRFTISRDNSKNTLYLQMNSLRAEDTAVYYCAKSGPGLRQVGFDYWGQGTLVTVSS

SEQ ID NO: 154 - protein, 121 aa, synthetic construct
  source 1..121: note = 1A7[CD28]_H1.39
EVQLLESGGGLVQPGGSLRLSCAASGFTFSSYAMSWVRQAPGKGLEWVSTISGSGTYTYYADSVKGRFTISRDNSKNTLYLQMNSLRAEDTAVYYCAKSGPGLRQVGFDYWGQGTLVTVSS

SEQ ID NO: 155 - protein, 121 aa, synthetic construct
  source 1..121: note = 1A7[CD28]_H1.40
EVQLLESGGGLVQPGGSLRLSCAASGFTFSSYAMSWVRQAPGKGLEWVSTISGSGYYTYYADSVKGRFTISRDNSKNTLYLQMNSLRAEDTAVYYCAKSGPGLRQVGFDYWGQGTLVTVSS

SEQ ID NO: 156 - protein, 121 aa, synthetic construct
  source 1..121: note = 1A7[CD28]_H1.41
EVQLLESGGGLVQPGGSLRLSCAASGFTFSSYYMSWVRQAPGKGLEWVSTIEGSGDYTYYADSVKGRFTISRDNSKNTLYLQMNSLRAEDTAVYYCAKSGPGLRQVGFDYWGQGTLVTVSS

SEQ ID NO: 157 - protein, 121 aa, synthetic construct
  source 1..121: note = 1A7[CD28]_H1.42
EVQLLESGGGLVQPGGSLRLSCAASGFTFSSYYMSWVRQAPGKGLEWVSTISESGDYTYYADSVKGRFTISRDNSKNTLYLQMNSLRAEDTAVYYCAKSGPGLRQVGFDYWGQGTLVTVSS

SEQ ID NO: 158 - protein, 121 aa, synthetic construct
  source 1..121: note = 1A7[CD28]_H1.43
EVQLLESGGGLVQPGGSLRLSCAASGFSFSGNYMTWVRQAPGKGLEWVATITADSDATYYADSVKGRFTISRDNSKNTLYLQMNSLRAEDTAVYYCAKSGPGLRQVGFDYWGQGTLVTVSS

SEQ ID NO: 159 - protein, 121 aa, synthetic construct
  source 1..121: note = 1A7[CD28]_H1.44
EVQLLESGGGLVQPGGSLRLSCAASGFTFSGYSMNWVRQAPGKGLEWVATIYANGSYTYYADSVKGRFTISRDNSKNTLYLQMNSLRAEDTAVYYCAKSGPGLRQVGFDYWGQGTLVTVSS

SEQ ID NO: 160 - protein, 121 aa, synthetic construct
  source 1..121: note = 1A7[CD28]_H1.45
EVQLLESGGGLVQPGGSLRLSCAASGFNFEEYSMNWVRQAPGKGLEWVATITYNGDYTYYADSVKGRFTISRDNSKNTLYLQMNSLRAEDTAVYYCAKSGPGLRQVGFDYWGQGTLVTVSS

SEQ ID NO: 161 - protein, 121 aa, synthetic construct
  source 1..121: note = 1A7[CD28]_H1.46
EVQLLESGGGLVQPGGSLRLSCAASGFSFRTYYMTWVRQAPGKGLEWVATITSDGDYTYYADSVKGRFTISRDNSKNTLYLQMNSLRAEDTAVYYCAKSGPGLRQVGFDYWGQGTLVTVSS

SEQ ID NO: 162 - protein, 121 aa, synthetic construct
  source 1..121: note = 1A7[CD28]_H1.47
EVQLLESGGGLVQPGGSLRLSCAASGFSFKGYSMNWVRQAPGKGLEWVATIYASSDSTYYADSVKGRFTISRDNSKNTLYLQMNSLRAEDTAVYYCAKSGPGLRQVGFDYWGQGTLVTVSS

SEQ ID NO: 163 - protein, 121 aa, synthetic construct
  source 1..121: note = 1A7[CD28]_H1.48
EVQLLESGGGLVQPGGSLRLSCAASGFSFGEYSMNWVRQAPGKGLEWVSTIYADGDYTYYADSVKGRFTISRDNSKNTLYLQMNSLRAEDTAVYYCAKSGPGLRQVGFDYWGQGTLVTVSS

SEQ ID NO: 164 - protein, 121 aa, synthetic construct
  source 1..121: note = 1A7[CD28]_H1.49
EVQLLESGGGLVQPGGSLRLSCAASGFTFTDYSMNWVRQAPGKGLEWVATIYADSSSTYYADSVKGRFTISRDNSKNTLYLQMNSLRAEDTAVYYCAKSGPGLRQVGFDYWGQGTLVTVSS

SEQ ID NO: 165 - protein, 121 aa, synthetic construct
  source 1..121: note = 1A7[CD28]_H1.50
EVQLLESGGGLVQPGGSLRLSCAASGFTFGGYSMNWVRQAPGKGLEWVATIYYDSTTTYYADSVKGRFTISRDNSKNTLYLQMNSLRAEDTAVYYCAKSGPGLRQVGFDYWGQGTLVTVSS

SEQ ID NO: 166 - protein, 121 aa, synthetic construct
  source 1..121: note = 1A7[CD28]_H1.51
EVQLLESGGGLVQPGGSLRLSCAASGFTFGAYSMNWVRQAPGKGLEWVSTIYNDGATTYYADSVKGRFTISRDNSKNTLYLQMNSLRAEDTAVYYCAKSGPGLRQVGFDYWGQGTLVTVSS

SEQ ID NO: 167 - protein, 121 aa, synthetic construct
  source 1..121: note = 1A7[CD28]_H1.52
EVQLLESGGGLVQPGGSLRLSCAASGFSFEAYSMNWVRQAPGKGLEWVATIYYDSSYTYYADSVKGRFTISRDNSKNTLYLQMNSLRAEDTAVYYCAKSGPGLRQVGFDYWGQGTLVTVSS

SEQ ID NO: 168 - protein, 121 aa, synthetic construct
  source 1..121: note = 1A7[CD28]_H1.53
EVQLLESGGGLVQPGGSLRLSCAASGFSFGSYYMSWVRQAPGKGLEWVASIYYGGYDTYYADSVKGRFTISRDNSKNTLYLQMNSLRAEDTAVYYCAKSGPGLRQVGFDYWGQGTLVTVSS

SEQ ID NO: 169 - protein, 121 aa, synthetic construct
  source 1..121: note = 1A7[CD28]_H1.54
EVQLLESGGGLVQPGGSLRLSCAASGFNFAEYSMSWVRQAPGKGLEWVATIYAGSDYTYYADSVKGRFTISRDNSKNTLYLQMNSLRAEDTAVYYCAKSGPGLRQVGFDYWGQGTLVTVSS

SEQ ID NO: 170 - protein, 121 aa, synthetic construct
  source 1..121: note = 1A7[CD28]_H1.55
EVQLLESGGGLVQPGGSLRLSCAASGFTFGAYSINWVRQAPGKGLEWVATIYYDGSYTYYADSVKGRFTISRDNSKNTLYLQMNSLRAEDTAVYYCAKSGPGLRQVGFDYWGQGTLVTVSS

SEQ ID NO: 171 - protein, 121 aa, synthetic construct
  source 1..121: note = 1A7[CD28]_H1.56
EVQLLESGGGLVQPGGSLRLSCAASGFTFSRYYINWVRQAPGKGLEWVASIYDGGADTYYADSVKGRFTISRDNSKNTLYLQMNSLRAEDTAVYYCAKSGPGLRQVGFDYWGQGTLVTVSS

SEQ ID NO: 172 - protein, 121 aa, synthetic construct
  source 1..121: note = 1A7[CD28]_H1.57
EVQLLESGGGLVQPGGSLRLSCAASGFSFGTYSINWVRQAPGKGLEWVSTIYYDGASTYYADSVKGRFTISRDNSKNTLYLQMNSLRAEDTAVYYCAKSGPGLRQVGFDYWGQGTLVTVSS

SEQ ID NO: 173 - protein, 121 aa, synthetic construct
  source 1..121: note = 1A7[CD28]_H1.58
EVQLLESGGGLVQPGGSLRLSCAASGFTFGKYSISWVRQAPGKGLEWVATIYNDGYYTYYADSVKGRFTISRDNSKNTLYLQMNSLRAEDTAVYYCAKSGPGLRQVGFDYWGQGTLVTVSS

SEQ ID NO: 174 - protein, 121 aa, synthetic construct
  source 1..121: note = 1A7[CD28]_H1.59
EVQLLESGGGLVQPGGSLRLSCAASGFSFEKYYISWVRQAPGKGLEWVASIYDGSYDTYYADSVKGRFTISRDNSKNTLYLQMNSLRAEDTAVYYCAKSGPGLRQVGFDYWGQGTLVTVSS

SEQ ID NO: 175 - protein, 121 aa, synthetic construct
  source 1..121: note = 1A7[CD28]_H1.60
EVQLLESGGGLVQPGGSLRLSCAASGFSFGTYSMNWVRQAPGKGLEWVATIDYDGSNTYYADSVKGRFTISRDNSKNTLYLQMNSLRAEDTAVYYCAKSGPGLRQVGFDYWGQGTLVTVSS

SEQ ID NO: 176 - protein, 121 aa, synthetic construct
  source 1..121: note = 1A7[CD28]_H1.61
EVQLLESGGGLVQPGGSLRLSCAASGFSFAAYSMSWVRQAPGKGLEWVATIYAGSDYTYYADSVKGRFTISRDNSKNTLYLQMNSLRAEDTAVYYCAKSGPGLRQVGFDYWGQGTLVTVSS

SEQ ID NO: 177 - protein, 121 aa, synthetic construct
  source 1..121: note = 1A7[CD28]_H1.62
EVQLLESGGGLVQPGGSLRLSCAASGFTFTTYSMTWVRQAPGKGLEWVATIYNDGYYTYYADSVKGRFTISRDNSKNTLYLQMNSLRAEDTAVYYCAKSGPGLRQVGFDYWGQGTLVTVSS

SEQ ID NO: 178 - protein, 121 aa, synthetic construct
  source 1..121: note = 1A7[CD28]_H1.63
EVQLLESGGGLVQPGGSLRLSCAASGFSFKDYSMNWVRQAPGKGLEWVATIYYDGTYTYYADSVKGRFTISRDNSKNTLYLQMNSLRAEDTAVYYCAKSGPGLRQVGFDYWGQGTLVTVSS

SEQ ID NO: 179 - protein, 121 aa, synthetic construct
  source 1..121: note = 1A7[CD28]_H1.64
EVQLLESGGGLVQPGGSLRLSCAASGFSFAAYSMNWVRQAPGKGLEWVATIYAGGAYTYYADSVKGRFTISRDNSKNTLYLQMNSLRAEDTAVYYCAKSGPGLRQVGFDYWGQGTLVTVSS

SEQ ID NO: 180 - protein, 121 aa, synthetic construct
  source 1..121: note = 1A7[CD28]_H1.65
EVQLLESGGGLVQPGGSLRLSCAASGFNFAEYYISWVRQAPGKGLEWVASIYNGGSDTYYADSVKGRFTISRDNSKNTLYLQMNSLRAEDTAVYYCAKSGPGLRQVGFDYWGQGTLVTVSS

SEQ ID NO: 181 - protein, 121 aa, synthetic construct
  source 1..121: note = 1A7[CD28]_H1.66
EVQLLESGGGLVQPGGSLRLSCAASGFSLGEYYMNWVRQAPGKGLEWVSTIDYDGTYTYYADSVKGRFTISRDNSKNTLYLQMNSLRAEDTAVYYCAKSGPGLRQVGFDYWGQGTLVTVSS

SEQ ID NO: 182 - protein, 121 aa, synthetic construct
  source 1..121: note = 1A7[CD28]_H1.67
EVQLLESGGGLVQPGGSLRLSCAASGFTFNEYYITWVRQAPGKGLEWVSSIYSSSYDTYYADSVKGRFTISRDNSKNTLYLQMNSLRAEDTAVYYCAKSGPGLRQVGFDYWGQGTLVTVSS

SEQ ID NO: 183 - protein, 121 aa, synthetic construct
  source 1..121: note = 1A7[CD28]_H1.68
EVQLLESGGGLVQPGGSLRLSCAASGFTFKDYYITWVRQAPGKGLEWVSSIYTSGYDTYYADSVKGRFTISRDNSKNTLYLQMNSLRAEDTAVYYCAKSGPGLRQVGFDYWGQGTLVTVSS

SEQ ID NO: 184 - protein, 121 aa, synthetic construct
  source 1..121: note = 1A7[CD28]_H1.69
EVQLLESGGGLVQPGGSLRLSCAASGFSFGKYSINWVRQAPGKGLEWVATIYSDGTDTYYADSVKGRFTISRDNSKNTLYLQMNSLRAEDTAVYYCAKSGPGLRQVGFDYWGQGTLVTVSS

SEQ ID NO: 185 - protein, 107 aa, synthetic construct
  source 1..107: note = 1A7[CD28]_L1.1
DIQMTQSPSSLSASVGDRVTITCRASQSISAYLNWYQQKPGKAPKLLIYAASSLQSGVPSRFSGSGSGTDFTLTISSLQPEDFATYYCQQSYSTPFTFGQGTKLEIK

SEQ ID NO: 186 - protein, 107 aa, synthetic construct
  source 1..107: note = 1A7[CD28]_L1.2
DIQMTQSPSSLSASVGDRVTITCRASQSISDYLNWYQQKPGKAPKLLIYAASSLQSGVPSRFSGSGSGTDFTLTISSLQPEDFATYYCQQSYSTPFTFGQGTKLEIK

SEQ ID NO: 187 - protein, 107 aa, synthetic construct
  source 1..107: note = 1A7[CD28]_L1.3
DIQMTQSPSSLSASVGDRVTITCRASQSISGYLNWYQQKPGKAPKLLIYAASSLQSGVPSRFSGSGSGTDFTLTISSLQPEDFATYYCQQSYSTPFTFGQGTKLEIK

SEQ ID NO: 188 - protein, 107 aa, synthetic construct
  source 1..107: note = 1A7[CD28]_L1.4
DIQMTQSPSSLSASVGDRVTITCRASQSISHYLNWYQQKPGKAPKLLIYAASSLQSGVPSRFSGSGSGTDFTLTISSLQPEDFATYYCQQSYSTPFTFGQGTKLEIK

SEQ ID NO: 189 - protein, 107 aa, synthetic construct
  source 1..107: note = 1A7[CD28]_L1.5
DIQMTQSPSSLSASVGDRVTITCRASQSISKYLNWYQQKPGKAPKLLIYAASSLQSGVPSRFSGSGSGTDFTLTISSLQPEDFATYYCQQSYSTPFTFGQGTKLEIK

SEQ ID NO: 190 - protein, 107 aa, synthetic construct
  source 1..107: note = 1A7[CD28]_L1.6
DIQMTQSPSSLSASVGDRVTITCRASQSISNYLNWYQQKPGKAPKLLIYAASSLQSGVPSRFSGSGSGTDFTLTISSLQPEDFATYYCQQSYSTPFTFGQGTKLEIK

SEQ ID NO: 191 - protein, 107 aa, synthetic construct
  source 1..107: note = 1A7[CD28]_L1.7
DIQMTQSPSSLSASVGDRVTITCRASQSISQYLNWYQQKPGKAPKLLIYAASSLQSGVPSRFSGSGSGTDFTLTISSLQPEDFATYYCQQSYSTPFTFGQGTKLEIK

SEQ ID NO: 192 - protein, 107 aa, synthetic construct
  source 1..107: note = 1A7[CD28]_L1.8
DIQMTQSPSSLSASVGDRVTITCRASQSISTYLNWYQQKPGKAPKLLIYAASSLQSGVPSRFSGSGSGTDFTLTISSLQPEDFATYYCQQSYSTPFTFGQGTKLEIK

SEQ ID NO: 193 - protein, 107 aa, synthetic construct
  source 1..107: note = 1A7[CD28]_L1.9
DIQMTQSPSSLSASVGDRVTITCRASQSISVYLNWYQQKPGKAPKLLIYAASSLQSGVPSRFSGSGSGTDFTLTISSLQPEDFATYYCQQSYSTPFTFGQGTKLEIK

SEQ ID NO: 194 - protein, 107 aa, synthetic construct
  source 1..107: note = 1A7[CD28]_L1.10
DIQMTQSPSSLSASVGDRVTITCRASQSISYYLNWYQQKPGKAPKLLIYAASSLQSGVPSRFSGSGSGTDFTLTISSLQPEDFATYYCQQSYSTPFTFGQGTKLEIK

SEQ ID NO: 195 - protein, 107 aa, synthetic construct
  source 1..107: note = 1A7[CD28]_L1.11
DIQMTQSPSSLSASVGDRVTITCRASQSISSALNWYQQKPGKAPKLLIYAASSLQSGVPSRFSGSGSGTDFTLTISSLQPEDFATYYCQQSYSTPFTFGQGTKLEIK

SEQ ID NO: 196 - protein, 107 aa, synthetic construct
  source 1..107: note = 1A7[CD28]_L1.12
DIQMTQSPSSLSASVGDRVTITCRASQSISSDLNWYQQKPGKAPKLLIYAASSLQSGVPSRFSGSGSGTDFTLTISSLQPEDFATYYCQQSYSTPFTFGQGTKLEIK

SEQ ID NO: 197 - protein, 107 aa, synthetic construct
  source 1..107: note = 1A7[CD28]_L1.13
DIQMTQSPSSLSASVGDRVTITCRASQSISSFLNWYQQKPGKAPKLLIYAASSLQSGVPSRFSGSGSGTDFTLTISSLQPEDFATYYCQQSYSTPFTFGQGTKLEIK

SEQ ID NO: 198 - protein, 107 aa, synthetic construct
  source 1..107: note = 1A7[CD28]_L1.14
DIQMTQSPSSLSASVGDRVTITCRASQSISSHLNWYQQKPGKAPKLLIYAASSLQSGVPSRFSGSGSGTDFTLTISSLQPEDFATYYCQQSYSTPFTFGQGTKLEIK

SEQ ID NO: 199 - protein, 107 aa, synthetic construct
  source 1..107: note = 1A7[CD28]_L1.15
DIQMTQSPSSLSASVGDRVTITCRASQSISSKLNWYQQKPGKAPKLLIYAASSLQSGVPSRFSGSGSGTDFTLTISSLQPEDFATYYCQQSYSTPFTFGQGTKLEIK

SEQ ID NO: 200 - protein, 107 aa, synthetic construct
  source 1..107: note = 1A7[CD28]_L1.16
DIQMTQSPSSLSASVGDRVTITCRASQSISSLLNWYQQKPGKAPKLLIYAASSLQSGVPSRFSGSGSGTDFTLTISSLQPEDFATYYCQQSYSTPFTFGQGTKLEIK

SEQ ID NO: 201 - protein, 107 aa, synthetic construct
  source 1..107: note = 1A7[CD28]_L1.17
DIQMTQSPSSLSASVGDRVTITCRASQSISSNLNWYQQKPGKAPKLLIYAASSLQSGVPSRFSGSGSGTDFTLTISSLQPEDFATYYCQQSYSTPFTFGQGTKLEIK

SEQ ID NO: 202 - protein, 107 aa, synthetic construct
  source 1..107: note = 1A7[CD28]_L1.18
DIQMTQSPSSLSASVGDRVTITCRASQSISSQLNWYQQKPGKAPKLLIYAASSLQSGVPSRFSGSGSGTDFTLTISSLQPEDFATYYCQQSYSTPFTFGQGTKLEIK

SEQ ID NO: 203 - protein, 107 aa, synthetic construct
  source 1..107: note = 1A7[CD28]_L1.19
DIQMTQSPSSLSASVGDRVTITCRASQSISSSLNWYQQKPGKAPKLLIYAASSLQSGVPSRFSGSGSGTDFTLTISSLQPEDFATYYCQQSYSTPFTFGQGTKLEIK

SEQ ID NO: 204 - protein, 107 aa, synthetic construct
  source 1..107: note = 1A7[CD28]_L1.20
DIQMTQSPSSLSASVGDRVTITCRASQSISSWLNWYQQKPGKAPKLLIYAASSLQSGVPSRFSGSGSGTDFTLTISSLQPEDFATYYCQQSYSTPFTFGQGTKLEIK

SEQ ID NO: 205 - protein, 107 aa, synthetic construct
  source 1..107: note = 1A7[CD28]_L1.21
DIQMTQSPSSLSASVGDRVTITCRASQSISSYLAWYQQKPGKAPKLLIYAASSLQSGVPSRFSGSGSGTDFTLTISSLQPEDFATYYCQQSYSTPFTFGQGTKLEIK

SEQ ID NO: 206 - protein, 107 aa, synthetic construct
  source 1..107: note = 1A7[CD28]_L1.22
DIQMTQSPSSLSASVGDRVTITCRASQSISSYLDWYQQKPGKAPKLLIYAASSLQSGVPSRFSGSGSGTDFTLTISSLQPEDFATYYCQQSYSTPFTFGQGTKLEIK

SEQ ID NO: 207 - protein, 107 aa, synthetic construct
  source 1..107: note = 1A7[CD28]_L1.23
DIQMTQSPSSLSASVGDRVTITCRASQSISSYLGWYQQKPGKAPKLLIYAASSLQSGVPSRFSGSGSGTDFTLTISSLQPEDFATYYCQQSYSTPFTFGQGTKLEIK

SEQ ID NO: 208 - protein, 107 aa, synthetic construct
  source 1..107: note = 1A7[CD28]_L1.24
DIQMTQSPSSLSASVGDRVTITCRASQSISSYLHWYQQKPGKAPKLLIYAASSLQSGVPSRFSGSGSGTDFTLTISSLQPEDFATYYCQQSYSTPFTFGQGTKLEIK

SEQ ID NO: 209 - protein, 107 aa, synthetic construct
  source 1..107: note = 1A7[CD28]_L1.25
DIQMTQSPSSLSASVGDRVTITCRASQSISSYLQWYQQKPGKAPKLLIYAASSLQSGVPSRFSGSGSGTDFTLTISSLQPEDFATYYCQQSYSTPFTFGQGTKLEIK

SEQ ID NO: 210 - protein, 107 aa, synthetic construct
  source 1..107: note = 1A7[CD28]_L1.26
DIQMTQSPSSLSASVGDRVTITCRASQSISSYLSWYQQKPGKAPKLLIYAASSLQSGVPSRFSGSGSGTDFTLTISSLQPEDFATYYCQQSYSTPFTFGQGTKLEIK

SEQ ID NO: 211 - protein, 107 aa, synthetic construct
  source 1..107: note = 1A7[CD28]_L1.27
DIQMTQSPSSLSASVGDRVTITCRASQSISSYLTWYQQKPGKAPKLLIYAASSLQSGVPSRFSGSGSGTDFTLTISSLQPEDFATYYCQQSYSTPFTFGQGTKLEIK

SEQ ID NO: 212 - protein, 107 aa, synthetic construct
  source 1..107: note = 1A7[CD28]_L1.28
DIQMTQSPSSLSASVGDRVTITCRASQSISSYLYWYQQKPGKAPKLLIYAASSLQSGVPSRFSGSGSGTDFTLTISSLQPEDFATYYCQQSYSTPFTFGQGTKLEIK

SEQ ID NO: 213 - protein, 107 aa, synthetic construct
  source 1..107: note = 1A7[CD28]_L1.29
DIQMTQSPSSLSASVGDRVTITCRASQSISSYLNWYQQKPGKAPKLLIYDASSLQSGVPSRFSGSGSGTDFTLTISSLQPEDFATYYCQQSYSTPFTFGQGTKLEIK

SEQ ID NO: 214 - protein, 107 aa, synthetic construct
  source 1..107: note = 1A7[CD28]_L1.30
DIQMTQSPSSLSASVGDRVTITCRASQSISSYLNWYQQKPGKAPKLLIYGASSLQSGVPSRFSGSGSGTDFTLTISSLQPEDFATYYCQQSYSTPFTFGQGTKLEIK

SEQ ID NO: 215 - protein, 107 aa, synthetic construct
  source 1..107: note = 1A7[CD28]_L1.31
DIQMTQSPSSLSASVGDRVTITCRASQSISSYLNWYQQKPGKAPKLLIYKASSLQSGVPSRFSGSGSGTDFTLTISSLQPEDFATYYCQQSYSTPFTFGQGTKLEIK

SEQ ID NO: 216 - protein, 107 aa, synthetic construct
  source 1..107: note = 1A7[CD28]_L1.32
DIQMTQSPSSLSASVGDRVTITCRASQSISSYLNWYQQKPGKAPKLLIYLASSLQSGVPSRFSGSGSGTDFTLTISSLQPEDFATYYCQQSYSTPFTFGQGTKLEIK

SEQ ID NO: 217 - protein, 107 aa, synthetic construct
  source 1..107: note = 1A7[CD28]_L1.33
DIQMTQSPSSLSASVGDRVTITCRASQSISSYLNWYQQKPGKAPKLLIYQASSLQSGVPSRFSGSGSGTDFTLTISSLQPEDFATYYCQQSYSTPFTFGQGTKLEIK

SEQ ID NO: 218 - protein, 107 aa, synthetic construct
  source 1..107: note = 1A7[CD28]_L1.34
DIQMTQSPSSLSASVGDRVTITCRASQSISSYLNWYQQKPGKAPKLLIYSASSLQSGVPSRFSGSGSGTDFTLTISSLQPEDFATYYCQQSYSTPFTFGQGTKLEIK

SEQ ID NO: 219 - protein, 107 aa, synthetic construct
  source 1..107: note = 1A7[CD28]_L1.35
DIQMTQSPSSLSASVGDRVTITCRASQSISSYLNWYQQKPGKAPKLLIYTASSLQSGVPSRFSGSGSGTDFTLTISSLQPEDFATYYCQQSYSTPFTFGQGTKLEIK

SEQ ID NO: 220 - protein, 107 aa, synthetic construct
  source 1..107: note = 1A7[CD28]_L1.36
DIQMTQSPSSLSASVGDRVTITCRASQSISSYLNWYQQKPGKAPKLLIYWASSLQSGVPSRFSGSGSGTDFTLTISSLQPEDFATYYCQQSYSTPFTFGQGTKLEIK

SEQ ID NO: 221 - protein, 107 aa, synthetic construct
  source 1..107: note = 1A7[CD28]_L1.37
DIQMTQSPSSLSASVGDRVTITCRASQSISSYLNWYQQKPGKAPKLLIYYASSLQSGVPSRFSGSGSGTDFTLTISSLQPEDFATYYCQQSYSTPFTFGQGTKLEIK

SEQ ID NO: 222 - protein, 107 aa, synthetic construct
  source 1..107: note = 1A7[CD28]_L1.38
DIQMTQSPSSLSASVGDRVTITCRASQSISSYLNWYQQKPGKAPKLLIYAASALQSGVPSRFSGSGSGTDFTLTISSLQPEDFATYYCQQSYSTPFTFGQGTKLEIK

SEQ ID NO: 223 - protein, 107 aa, synthetic construct
  source 1..107: note = 1A7[CD28]_L1.39
DIQMTQSPSSLSASVGDRVTITCRASQSISSYLNWYQQKPGKAPKLLIYAASDLQSGVPSRFSGSGSGTDFTLTISSLQPEDFATYYCQQSYSTPFTFGQGTKLEIK

SEQ ID NO: 224 - protein, 107 aa, synthetic construct
  source 1..107: note = 1A7[CD28]_L1.40
DIQMTQSPSSLSASVGDRVTITCRASQSISSYLNWYQQKPGKAPKLLIYAASKLQSGVPSRFSGSGSGTDFTLTISSLQPEDFATYYCQQSYSTPFTFGQGTKLEIK

SEQ ID NO: 225 - protein, 107 aa, synthetic construct
  source 1..107: note = 1A7[CD28]_L1.41
DIQMTQSPSSLSASVGDRVTITCRASQSISSYLNWYQQKPGKAPKLLIYAASNLQSGVPSRFSGSGSGTDFTLTISSLQPEDFATYYCQQSYSTPFTFGQGTKLEIK

SEQ ID NO: 226 - protein, 107 aa, synthetic construct
  source 1..107: note = 1A7[CD28]_L1.42
DIQMTQSPSSLSASVGDRVTITCRASQSISSYLNWYQQKPGKAPKLLIYAASQLQSGVPSRFSGSGSGTDFTLTISSLQPEDFATYYCQQSYSTPFTFGQGTKLEIK

SEQ ID NO: 227 - protein, 107 aa, synthetic construct
  source 1..107: note = 1A7[CD28]_L1.43
DIQMTQSPSSLSASVGDRVTITCRASQSISSYLNWYQQKPGKAPKLLIYAASTLQSGVPSRFSGSGSGTDFTLTISSLQPEDFATYYCQQSYSTPFTFGQGTKLEIK

SEQ ID NO: 228 - protein, 107 aa, synthetic construct
  source 1..107: note = 1A7[CD28]_L1.44
DIQMTQSPSSLSASVGDRVTITCRASQSISSYLNWYQQKPGKAPKLLIYAASYLQSGVPSRFSGSGSGTDFTLTISSLQPEDFATYYCQQSYSTPFTFGQGTKLEIK

SEQ ID NO: 229 - protein, 107 aa, synthetic construct
  source 1..107: note = 1A7[CD28]_L1.45
DIQMTQSPSSLSASVGDRVTITCRASQSISSYLNWYQQKPGKAPKLLIYAASSLASGVPSRFSGSGSGTDFTLTISSLQPEDFATYYCQQSYSTPFTFGQGTKLEIK

SEQ ID NO: 230 - protein, 107 aa, synthetic construct
  source 1..107: note = 1A7[CD28]_L1.46
DIQMTQSPSSLSASVGDRVTITCRASQSISSYLNWYQQKPGKAPKLLIYAASSLESGVPSRFSGSGSGTDFTLTISSLQPEDFATYYCQQSYSTPFTFGQGTKLEIK

SEQ ID NO: 231 - protein, 107 aa, synthetic construct
  source 1..107: note = 1A7[CD28]_L1.47
DIQMTQSPSSLSASVGDRVTITCRASQSISSYLNWYQQKPGKAPKLLIYAASSLFSGVPSRFSGSGSGTDFTLTISSLQPEDFATYYCQQSYSTPFTFGQGTKLEIK

SEQ ID NO: 232 - protein, 107 aa, synthetic construct
  source 1..107: note = 1A7[CD28]_L1.48
DIQMTQSPSSLSASVGDRVTITCRASQSISSYLNWYQQKPGKAPKLLIYAASSLHSGVPSRFSGSGSGTDFTLTISSLQPEDFATYYCQQSYSTPFTFGQGTKLEIK

SEQ ID NO: 233 - protein, 107 aa, synthetic construct
  source 1..107: note = 1A7[CD28]_L1.49
DIQMTQSPSSLSASVGDRVTITCRASQSISSYLNWYQQKPGKAPKLLIYAASSLISGVPSRFSGSGSGTDFTLTISSLQPEDFATYYCQQSYSTPFTFGQGTKLEIK

SEQ ID NO: 234 - protein, 107 aa, synthetic construct
  source 1..107: note = 1A7[CD28]_L1.50
DIQMTQSPSSLSASVGDRVTITCRASQSISSYLNWYQQKPGKAPKLLIYAASSLKSGVPSRFSGSGSGTDFTLTISSLQPEDFATYYCQQSYSTPFTFGQGTKLEIK

SEQ ID NO: 235 - protein, 107 aa, synthetic construct
  source 1..107: note = 1A7[CD28]_L1.51
DIQMTQSPSSLSASVGDRVTITCRASQSISSYLNWYQQKPGKAPKLLIYAASSLNSGVPSRFSGSGSGTDFTLTISSLQPEDFATYYCQQSYSTPFTFGQGTKLEIK

SEQ ID NO: 236 - protein, 107 aa, synthetic construct
  source 1..107: note = 1A7[CD28]_L1.52
DIQMTQSPSSLSASVGDRVTITCRASQSISSYLNWYQQKPGKAPKLLIYAASSLSSGVPSRFSGSGSGTDFTLTISSLQPEDFATYYCQQSYSTPFTFGQGTKLEIK

SEQ ID NO: 237 - protein, 107 aa, synthetic construct
  source 1..107: note = 1A7[CD28]_L1.53
DIQMTQSPSSLSASVGDRVTITCRASQSISSYLNWYQQKPGKAPKLLIYAASSLVSGVPSRFSGSGSGTDFTLTISSLQPEDFATYYCQQSYSTPFTFGQGTKLEIK

SEQ ID NO: 238 - protein, 107 aa, synthetic construct
  source 1..107: note = 1A7[CD28]_L1.54
DIQMTQSPSSLSASVGDRVTITCRASQSISSYLNWYQQKPGKAPKLLIYAASSLYSGVPSRFSGSGSGTDFTLTISSLQPEDFATYYCQQSYSTPFTFGQGTKLEIK

SEQ ID NO: 239 - protein, 107 aa, synthetic construct
  source 1..107: note = 1A7[CD28]_L1.55
DIQMTQSPSSLSASVGDRVTITCRASQSISSYLNWYQQKPGKAPKLLIYAASSLQAGVPSRFSGSGSGTDFTLTISSLQPEDFATYYCQQSYSTPFTFGQGTKLEIK

SEQ ID NO: 240 - protein, 107 aa, synthetic construct
  source 1..107: note = 1A7[CD28]_L1.56
DIQMTQSPSSLSASVGDRVTITCRASQSISSYLNWYQQKPGKAPKLLIYAASSLQDGVPSRFSGSGSGTDFTLTISSLQPEDFATYYCQQSYSTPFTFGQGTKLEIK

SEQ ID NO: 241 - protein, 107 aa, synthetic construct
  source 1..107: note = 1A7[CD28]_L1.57
DIQMTQSPSSLSASVGDRVTITCRASQSISSYLNWYQQKPGKAPKLLIYAASSLQGGVPSRFSGSGSGTDFTLTISSLQPEDFATYYCQQSYSTPFTFGQGTKLEIK

SEQ ID NO: 242 - protein, 107 aa, synthetic construct
  source 1..107: note = 1A7[CD28]_L1.58
DIQMTQSPSSLSASVGDRVTITCRASQSISSYLNWYQQKPGKAPKLLIYAASSLQHGVPSRFSGSGSGTDFTLTISSLQPEDFATYYCQQSYSTPFTFGQGTKLEIK

SEQ ID NO: 243 - protein, 107 aa, synthetic construct
  source 1..107: note = 1A7[CD28]_L1.59
DIQMTQSPSSLSASVGDRVTITCRASQSISSYLNWYQQKPGKAPKLLIYAASSLQKGVPSRFSGSGSGTDFTLTISSLQPEDFATYYCQQSYSTPFTFGQGTKLEIK

SEQ ID NO: 244 - protein, 107 aa, synthetic construct
  source 1..107: note = 1A7[CD28]_L1.60
DIQMTQSPSSLSASVGDRVTITCRASQSISSYLNWYQQKPGKAPKLLIYAASSLQQGVPSRFSGSGSGTDFTLTISSLQPEDFATYYCQQSYSTPFTFGQGTKLEIK

SEQ ID NO: 245 - protein, 107 aa, synthetic construct
  source 1..107: note = 1A7[CD28]_L1.61
DIQMTQSPSSLSASVGDRVTITCRASQSISSYLNWYQQKPGKAPKLLIYAASSLQTGVPSRFSGSGSGTDFTLTISSLQPEDFATYYCQQSYSTPFTFGQGTKLEIK

SEQ ID NO: 246 - protein, 107 aa, synthetic construct
  source 1..107: note = 1A7[CD28]_L1.62
DIQMTQSPSSLSASVGDRVTITCRASQSISSYLNWYQQKPGKAPKLLIYAASSLQVGVPSRFSGSGSGTDFTLTISSLQPEDFATYYCQQSYSTPFTFGQGTKLEIK

SEQ ID NO: 247 - protein, 107 aa, synthetic construct
  source 1..107: note = 1A7[CD28]_L1.63
DIQMTQSPSSLSASVGDRVTITCRASQSISSYLNWYQQKPGKAPKLLIYAASSLQYGVPSRFSGSGSGTDFTLTISSLQPEDFATYYCQQSYSTPFTFGQGTKLEIK

SEQ ID NO: 248 - protein, 107 aa, synthetic construct
  source 1..107: note = 1A7[CD28]_L1.64
DIQMTQSPSSLSASVGDRVTITCRASQSISSYLNWYQQKPGKAPKLLIYAASSLQSGVPSRFSGSGSGTDFTLTISSLQPEDFATYYCQQAYSTPFTFGQGTKLEIK

SEQ ID NO: 249 - protein, 107 aa, synthetic construct
  source 1..107: note = 1A7[CD28]_L1.65
DIQMTQSPSSLSASVGDRVTITCRASQSISSYLNWYQQKPGKAPKLLIYAASSLQSGVPSRFSGSGSGTDFTLTISSLQPEDFATYYCQQDYSTPFTFGQGTKLEIK

SEQ ID NO: 250 - protein, 107 aa, synthetic construct
  source 1..107: note = 1A7[CD28]_L1.66
DIQMTQSPSSLSASVGDRVTITCRASQSISSYLNWYQQKPGKAPKLLIYAASSLQSGVPSRFSGSGSGTDFTLTISSLQPEDFATYYCQQFYSTPFTFGQGTKLEIK

SEQ ID NO: 251 - protein, 107 aa, synthetic construct
  source 1..107: note = 1A7[CD28]_L1.67
DIQMTQSPSSLSASVGDRVTITCRASQSISSYLNWYQQKPGKAPKLLIYAASSLQSGVPSRFSGSGSGTDFTLTISSLQPEDFATYYCQQHYSTPFTFGQGTKLEIK

SEQ ID NO: 252 - protein, 107 aa, synthetic construct
  source 1..107: note = 1A7[CD28]_L1.68
DIQMTQSPSSLSASVGDRVTITCRASQSISSYLNWYQQKPGKAPKLLIYAASSLQSGVPSRFSGSGSGTDFTLTISSLQPEDFATYYCQQKYSTPFTFGQGTKLEIK

SEQ ID NO: 253 - protein, 107 aa, synthetic construct
  source 1..107: note = 1A7[CD28]_L1.69
DIQMTQSPSSLSASVGDRVTITCRASQSISSYLNWYQQKPGKAPKLLIYAASSLQSGVPSRFSGSGSGTDFTLTISSLQPEDFATYYCQQLYSTPFTFGQGTKLEIK

SEQ ID NO: 254 - protein, 107 aa, synthetic construct
  source 1..107: note = 1A7[CD28]_L1.70
DIQMTQSPSSLSASVGDRVTITCRASQSISSYLNWYQQKPGKAPKLLIYAASSLQSGVPSRFSGSGSGTDFTLTISSLQPEDFATYYCQQTYSTPFTFGQGTKLEIK

SEQ ID NO: 255 - protein, 107 aa, synthetic construct
  source 1..107: note = 1A7[CD28]_L1.71
DIQMTQSPSSLSASVGDRVTITCRASQSISSYLNWYQQKPGKAPKLLIYAASSLQSGVPSRFSGSGSGTDFTLTISSLQPEDFATYYCQQVYSTPFTFGQGTKLEIK

SEQ ID NO: 256 - protein, 107 aa, synthetic construct
  source 1..107: note = 1A7[CD28]_L1.72
DIQMTQSPSSLSASVGDRVTITCRASQSISSYLNWYQQKPGKAPKLLIYAASSLQSGVPSRFSGSGSGTDFTLTISSLQPEDFATYYCQQYYSTPFTFGQGTKLEIK

SEQ ID NO: 257 - protein, 107 aa, synthetic construct
  source 1..107: note = 1A7[CD28]_L1.73
DIQMTQSPSSLSASVGDRVTITCRASQSISSYLNWYQQKPGKAPKLLIYAASSLQSGVPSRFSGSGSGTDFTLTISSLQPEDFATYYCQQSASTPFTFGQGTKLEIK

SEQ ID NO: 258 - protein, 107 aa, synthetic construct
  source 1..107: note = 1A7[CD28]_L1.74
DIQMTQSPSSLSASVGDRVTITCRASQSISSYLNWYQQKPGKAPKLLIYAASSLQSGVPSRFSGSGSGTDFTLTISSLQPEDFATYYCQQSDSTPFTFGQGTKLEIK

SEQ ID NO: 259 - protein, 107 aa, synthetic construct
  source 1..107: note = 1A7[CD28]_L1.75
DIQMTQSPSSLSASVGDRVTITCRASQSISSYLNWYQQKPGKAPKLLIYAASSLQSGVPSRFSGSGSGTDFTLTISSLQPEDFATYYCQQSFSTPFTFGQGTKLEIK

SEQ ID NO: 260 - protein, 107 aa, synthetic construct
  source 1..107: note = 1A7[CD28]_L1.76
DIQMTQSPSSLSASVGDRVTITCRASQSISSYLNWYQQKPGKAPKLLIYAASSLQSGVPSRFSGSGSGTDFTLTISSLQPEDFATYYCQQSHSTPFTFGQGTKLEIK

SEQ ID NO: 261 - protein, 107 aa, synthetic construct
  source 1..107: note = 1A7[CD28]_L1.77
DIQMTQSPSSLSASVGDRVTITCRASQSISSYLNWYQQKPGKAPKLLIYAASSLQSGVPSRFSGSGSGTDFTLTISSLQPEDFATYYCQQSKSTPFTFGQGTKLEIK

SEQ ID NO: 262 - protein, 107 aa, synthetic construct
  source 1..107: note = 1A7[CD28]_L1.78
DIQMTQSPSSLSASVGDRVTITCRASQSISSYLNWYQQKPGKAPKLLIYAASSLQSGVPSRFSGSGSGTDFTLTISSLQPEDFATYYCQQSLSTPFTFGQGTKLEIK

SEQ ID NO: 263 - protein, 107 aa, synthetic construct
  source 1..107: note = 1A7[CD28]_L1.79
DIQMTQSPSSLSASVGDRVTITCRASQSISSYLNWYQQKPGKAPKLLIYAASSLQSGVPSRFSGSGSGTDFTLTISSLQPEDFATYYCQQSQSTPFTFGQGTKLEIK

SEQ ID NO: 264 - protein, 107 aa, synthetic construct
  source 1..107: note = 1A7[CD28]_L1.80
DIQMTQSPSSLSASVGDRVTITCRASQSISSYLNWYQQKPGKAPKLLIYAASSLQSGVPSRFSGSGSGTDFTLTISSLQPEDFATYYCQQSVSTPFTFGQGTKLEIK

SEQ ID NO: 265 - protein, 107 aa, synthetic construct
  source 1..107: note = 1A7[CD28]_L1.81
DIQMTQSPSSLSASVGDRVTITCRASQSISSYLNWYQQKPGKAPKLLIYAASSLQSGVPSRFSGSGSGTDFTLTISSLQPEDFATYYCQQSWSTPFTFGQGTKLEIK

SEQ ID NO: 266 - protein, 107 aa, synthetic construct
  source 1..107: note = 1A7[CD28]_L1.82
DIQMTQSPSSLSASVGDRVTITCRASQSISSYLNWYQQKPGKAPKLLIYAASSLQSGVPSRFSGSGSGTDFTLTISSLQPEDFATYYCQQSYATPFTFGQGTKLEIK

SEQ ID NO: 267 - protein, 107 aa, synthetic construct
  source 1..107: note = 1A7[CD28]_L1.83
DIQMTQSPSSLSASVGDRVTITCRASQSISSYLNWYQQKPGKAPKLLIYAASSLQSGVPSRFSGSGSGTDFTLTISSLQPEDFATYYCQQSYDTPFTFGQGTKLEIK

SEQ ID NO: 268 - protein, 107 aa, synthetic construct
  source 1..107: note = 1A7[CD28]_L1.84
DIQMTQSPSSLSASVGDRVTITCRASQSISSYLNWYQQKPGKAPKLLIYAASSLQSGVPSRFSGSGSGTDFTLTISSLQPEDFATYYCQQSYGTPFTFGQGTKLEIK

SEQ ID NO: 269 - protein, 107 aa, synthetic construct
  source 1..107: note = 1A7[CD28]_L1.85
DIQMTQSPSSLSASVGDRVTITCRASQSISSYLNWYQQKPGKAPKLLIYAASSLQSGVPSRFSGSGSGTDFTLTISSLQPEDFATYYCQQSYHTPFTFGQGTKLEIK

SEQ ID NO: 270 - protein, 107 aa, synthetic construct
  source 1..107: note = 1A7[CD28]_L1.86
DIQMTQSPSSLSASVGDRVTITCRASQSISSYLNWYQQKPGKAPKLLIYAASSLQSGVPSRFSGSGSGTDFTLTISSLQPEDFATYYCQQSYKTPFTFGQGTKLEIK

SEQ ID NO: 271 - protein, 107 aa, synthetic construct
  source 1..107: note = 1A7[CD28]_L1.87
DIQMTQSPSSLSASVGDRVTITCRASQSISSYLNWYQQKPGKAPKLLIYAASSLQSGVPSRFSGSGSGTDFTLTISSLQPEDFATYYCQQSYNTPFTFGQGTKLEIK

SEQ ID NO: 272 - protein, 107 aa, synthetic construct
  source 1..107: note = 1A7[CD28]_L1.88
DIQMTQSPSSLSASVGDRVTITCRASQSISSYLNWYQQKPGKAPKLLIYAASSLQSGVPSRFSGSGSGTDFTLTISSLQPEDFATYYCQQSYQTPFTFGQGTKLEIK

SEQ ID NO: 273 - protein, 107 aa, synthetic construct
  source 1..107: note = 1A7[CD28]_L1.89
DIQMTQSPSSLSASVGDRVTITCRASQSISSYLNWYQQKPGKAPKLLIYAASSLQSGVPSRFSGSGSGTDFTLTISSLQPEDFATYYCQQSYTTPFTFGQGTKLEIK

SEQ ID NO: 274 - protein, 107 aa, synthetic construct
  source 1..107: note = 1A7[CD28]_L1.90
DIQMTQSPSSLSASVGDRVTITCRASQSISSYLNWYQQKPGKAPKLLIYAASSLQSGVPSRFSGSGSGTDFTLTISSLQPEDFATYYCQQSYVTPFTFGQGTKLEIK

SEQ ID NO: 275 - protein, 107 aa, synthetic construct
  source 1..107: note = 1A7[CD28]_L1.91
DIQMTQSPSSLSASVGDRVTITCRASQSISSYLNWYQQKPGKAPKLLIYAASSLQSGVPSRFSGSGSGTDFTLTISSLQPEDFATYYCQQSYYTPFTFGQGTKLEIK

SEQ ID NO: 276 - protein, 107 aa, synthetic construct
  source 1..107: note = 1A7[CD28]_L1.92
DIQMTQSPSSLSASVGDRVTITCRASQSISSYLNWYQQKPGKAPKLLIYAASSLQSGVPSRFSGSGSGTDFTLTISSLQPEDFATYYCQQSYSAPFTFGQGTKLEIK

SEQ ID NO: 277 - protein, 107 aa, synthetic construct
  source 1..107: note = 1A7[CD28]_L1.93
DIQMTQSPSSLSASVGDRVTITCRASQSISSYLNWYQQKPGKAPKLLIYAASSLQSGVPSRFSGSGSGTDFTLTISSLQPEDFATYYCQQSYSDPFTFGQGTKLEIK

SEQ ID NO: 278 - protein, 107 aa, synthetic construct
  source 1..107: note = 1A7[CD28]_L1.94
DIQMTQSPSSLSASVGDRVTITCRASQSISSYLNWYQQKPGKAPKLLIYAASSLQSGVPSRFSGSGSGTDFTLTISSLQPEDFATYYCQQSYSFPFTFGQGTKLEIK

SEQ ID NO: 279 - protein, 107 aa, synthetic construct
  source 1..107: note = 1A7[CD28]_L1.95
DIQMTQSPSSLSASVGDRVTITCRASQSISSYLNWYQQKPGKAPKLLIYAASSLQSGVPSRFSGSGSGTDFTLTISSLQPEDFATYYCQQSYSIPFTFGQGTKLEIK

SEQ ID NO: 280 - protein, 107 aa, synthetic construct
  source 1..107: note = 1A7[CD28]_L1.96
DIQMTQSPSSLSASVGDRVTITCRASQSISSYLNWYQQKPGKAPKLLIYAASSLQSGVPSRFSGSGSGTDFTLTISSLQPEDFATYYCQQSYSKPFTFGQGTKLEIK

SEQ ID NO: 281 - protein, 107 aa, synthetic construct
  source 1..107: note = 1A7[CD28]_L1.97
DIQMTQSPSSLSASVGDRVTITCRASQSISSYLNWYQQKPGKAPKLLIYAASSLQSGVPSRFSGSGSGTDFTLTISSLQPEDFATYYCQQSYSLPFTFGQGTKLEIK

SEQ ID NO: 282 - protein, 107 aa, synthetic construct
  source 1..107: note = 1A7[CD28]_L1.98
DIQMTQSPSSLSASVGDRVTITCRASQSISSYLNWYQQKPGKAPKLLIYAASSLQSGVPSRFSGSGSGTDFTLTISSLQPEDFATYYCQQSYSQPFTFGQGTKLEIK

SEQ ID NO: 283 - protein, 107 aa, synthetic construct
  source 1..107: note = 1A7[CD28]_L1.99
DIQMTQSPSSLSASVGDRVTITCRASQSISSYLNWYQQKPGKAPKLLIYAASSLQSGVPSRFSGSGSGTDFTLTISSLQPEDFATYYCQQSYSSPFTFGQGTKLEIK

SEQ ID NO: 284 - protein, 107 aa, synthetic construct
  source 1..107: note = 1A7[CD28]_L1.100
DIQMTQSPSSLSASVGDRVTITCRASQSISSYLNWYQQKPGKAPKLLIYAASSLQSGVPSRFSGSGSGTDFTLTISSLQPEDFATYYCQQSYSVPFTFGQGTKLEIK

SEQ ID NO: 285 - protein, 107 aa, synthetic construct
  source 1..107: note = 1A7[CD28]_L1.101
DIQMTQSPSSLSASVGDRVTITCRASQSISSYLNWYQQKPGKAPKLLIYAASSLQSGVPSRFSGSGSGTDFTLTISSLQPEDFATYYCQQSYSYPFTFGQGTKLEIK

SEQ ID NO: 286 - protein, 107 aa, synthetic construct
  source 1..107: note = 1A7[CD28]_L1.102
DIQMTQSPSSLSASVGDRVTITCRASQSISSYLNWYQQKPGKAPKLLIYAASSLQSGVPSRFSGSGSGTDFTLTISSLQPEDFATYYCQQSYSTPITFGQGTKLEIK

SEQ ID NO: 287 - protein, 107 aa, synthetic construct
  source 1..107: note = 1A7[CD28]_L1.103
DIQMTQSPSSLSASVGDRVTITCRASQSISSYLNWYQQKPGKAPKLLIYAASSLQSGVPSRFSGSGSGTDFTLTISSLQPEDFATYYCQQSYSTPLTFGQGTKLEIK

SEQ ID NO: 288 - protein, 107 aa, synthetic construct
  source 1..107: note = 1A7[CD28]_L1.104
DIQMTQSPSSLSASVGDRVTITCRASQSISSYLNWYQQKPGKAPKLLIYAASSLQSGVPSRFSGSGSGTDFTLTISSLQPEDFATYYCQQSYSTPWTFGQGTKLEIK

SEQ ID NO: 289 - protein, 107 aa, synthetic construct
  source 1..107: note = 1A7[CD28]_L1.105
DIQMTQSPSSLSASVGDRVTITCRASQSISSYLTWYQQKPGKAPKLLIYAASSLQSGVPSRFSGSGSGTDFTLTISSLQPEDFATYYCQQVYSTPFTFGQGTKLEIK

SEQ ID NO: 290 - protein, 107 aa, synthetic construct
  source 1..107: note = 1A7[CD28]_L1.106
DIQMTQSPSSLSASVGDRVTITCRASQSISSYLTWYQQKPGKAPKLLIYAASSLQSGVPSRFSGSGSGTDFTLTISSLQPEDFATYYCQQSYNTPFTFGQGTKLEIK

SEQ ID NO: 291 - protein, 121 aa, synthetic construct; identical to SEQ ID NO: 116
  source 1..121: note = 1A7[CD28]_H1.1_L1 Variable Heavy (vh) Domain

SEQ ID NO: 292 - protein, 5 aa, synthetic construct
  source 1..5: note = 1A7[CD28]_H1.1_L1 vhCDR1
SYYMS

SEQ ID NO: 293 - protein, 17 aa, synthetic construct
  source 1..17: note = 1A7[CD28]_H1.1_L1 vhCDR2
TISGSGDSTYYADSVKG

SEQ ID NO: 294 - protein, 12 aa, synthetic construct
  source 1..12: note = 1A7[CD28]_H1.1_L1 vhCDR3
SGPGLRQVGFDY

SEQ ID NO: 295 - protein, 107 aa, synthetic construct; identical to SEQ ID NO: 110
  source 1..107: note = 1A7[CD28]_H1.1_L1 Variable Light (vl) Domain

SEQ ID NO: 296 - protein, 11 aa, synthetic construct
  source 1..11: note = 1A7[CD28]_H1.1_L1 vlCDR1
RASQSISSYLN

SEQ ID NO: 297 - protein, 7 aa, synthetic construct
  source 1..7: note = 1A7[CD28]_H1.1_L1 vlCDR2
AASSLQS

SEQ ID NO: 298 - protein, 9 aa, synthetic construct
  source 1..9: note = 1A7[CD28]_H1.1_L1 vlCDR3
QQSYSTPFT

SEQ ID NO: 299 - protein, 121 aa, synthetic construct; identical to SEQ ID NO: 106
  source 1..121: note = 1A7[CD28]_H1_L1.71 Variable Heavy (vh) Domain

SEQ ID NO: 300 - protein, 5 aa, synthetic construct
  source 1..5: note = 1A7[CD28]_H1_L1.71 vhCDR1
SYAMS

SEQ ID NO: 301 - protein, 17 aa, synthetic construct
  source 1..17: note = 1A7[CD28]_H1_L1.71 vhCDR2
TISGSGDSTYYADSVKG

SEQ ID NO: 302 - protein, 12 aa, synthetic construct
  source 1..12: note = 1A7[CD28]_H1_L1.71 vhCDR3
SGPGLRQVGFDY

SEQ ID NO: 303 - protein, 107 aa, synthetic construct; identical to SEQ ID NO: 255
  source 1..107: note = 1A7[CD28]_H1_L1.71 Variable Light (vl) Domain

SEQ ID NO: 304 - protein, 11 aa, synthetic construct
  source 1..11: note = 1A7[CD28]_H1_L1.71 vlCDR1
RASQSISSYLN

SEQ ID NO: 305 - protein, 7 aa, synthetic construct
  source 1..7: note = 1A7[CD28]_H1_L1.71 vlCDR2
AASSLQS

SEQ ID NO: 306 - protein, 9 aa, synthetic construct
  source 1..9: note = 1A7[CD28]_H1_L1.71 vlCDR3
QQVYSTPFT

SEQ ID NO: 307 - protein, 121 aa, synthetic construct; identical to SEQ ID NO: 116
  source 1..121: note = 1A7[CD28]_H1.1_L1.71 Variable Heavy (vh) Domain

SEQ ID NO: 308 - protein, 5 aa, synthetic construct
  source 1..5: note = 1A7[CD28]_H1.1_L1.71 vhCDR1
SYYMS

SEQ ID NO: 309 - protein, 17 aa, synthetic construct
  source 1..17: note = 1A7[CD28]_H1.1_L1.71 vhCDR2
TISGSGDSTYYADSVKG

SEQ ID NO: 310 - protein, 12 aa, synthetic construct
  source 1..12: note = 1A7[CD28]_H1.1_L1.71 vhCDR3
SGPGLRQVGFDY

SEQ ID NO: 311 - protein, 107 aa, synthetic construct; identical to SEQ ID NO: 255
  source 1..107: note = 1A7[CD28]_H1.1_L1.71 Variable Light (vl) Domain

SEQ ID NO: 312 - protein, 11 aa, synthetic construct
  source 1..11: note = 1A7[CD28]_H1.1_L1.71 vlCDR1
RASQSISSYLN

SEQ ID NO: 313 - protein, 7 aa, synthetic construct
  source 1..7: note = 1A7[CD28]_H1.1_L1.71 vlCDR2
AASSLQS

SEQ ID NO: 314 - protein, 9 aa, synthetic construct
  source 1..9: note = 1A7[CD28]_H1.1_L1.71 vlCDR3
QQVYSTPFT

SEQ ID NO: 315 - protein, 121 aa, synthetic construct; identical to SEQ ID NO: 129
  source 1..121: note = 1A7[CD28]_H1.14_L1 Variable Heavy (vh) Domain

SEQ ID NO: 316 - protein, 5 aa, synthetic construct
  source 1..5: note = 1A7[CD28]_H1.14_L1 vhCDR1
SYYMS

SEQ ID NO: 317 - protein, 17 aa, synthetic construct
  source 1..17: note = 1A7[CD28]_H1.14_L1 vhCDR2
TISESGDSTYYADSVKG

SEQ ID NO: 318 - protein, 12 aa, synthetic construct
  source 1..12: note = 1A7[CD28]_H1.14_L1 vhCDR3
SGPGLRQVGFDY

SEQ ID NO: 319 - protein, 107 aa, synthetic construct; identical to SEQ ID NO: 110
  source 1..107: note = 1A7[CD28]_H1.14_L1 Variable Light (vl) Domain

SEQ ID NO: 320 - protein, 11 aa, synthetic construct
  source 1..11: note = 1A7[CD28]_H1.14_L1 vlCDR1
RASQSISSYLN

SEQ ID NO: 321 - protein, 7 aa, synthetic construct
  source 1..7: note = 1A7[CD28]_H1.14_L1 vlCDR2
AASSLQS

SEQ ID NO: 322 - protein, 9 aa, synthetic construct
  source 1..9: note = 1A7[CD28]_H1.14_L1 vlCDR3
QQSYSTPFT

SEQ ID NO: 323 - protein, 121 aa, synthetic construct; identical to SEQ ID NO: 129
  source 1..121: note = 1A7[CD28]_H1.14_L1.71 Variable Heavy (vh) Domain

SEQ ID NO: 324 - protein, 5 aa, synthetic construct
  source 1..5: note = 1A7[CD28]_H1.14_L1.71 vhCDR1
SYYMS

SEQ ID NO: 325 - protein, 17 aa, synthetic construct
  source 1..17: note = 1A7[CD28]_H1.14_L1.71 vhCDR2
TISESGDSTYYADSVKG

SEQ ID NO: 326 - protein, 12 aa, synthetic construct
  source 1..12: note = 1A7[CD28]_H1.14_L1.71 vhCDR3
SGPGLRQVGFDY

SEQ ID NO: 327 - protein, 107 aa, synthetic construct; identical to SEQ ID NO: 255
  source 1..107: note = 1A7[CD28]_H1.14_L1.71 Variable Light (vl) Domain

SEQ ID NO: 328 - protein, 11 aa, synthetic construct
  source 1..11: note = 1A7[CD28]_H1.14_L1.71 vlCDR1
RASQSISSYLN

SEQ ID NO: 329 - protein, 7 aa, synthetic construct
  source 1..7: note = 1A7[CD28]_H1.14_L1.71 vlCDR2
AASSLQS

SEQ ID NO: 330 - protein, 9 aa, synthetic construct
  source 1..9: note = 1A7[CD28]_H1.14_L1.71 vlCDR3
QQVYSTPFT

SEQ ID NO: 331 - protein, 30 aa, synthetic construct
  source 1..30: note = 1A7 VH HFR1
  VARIANT 28: note = T, S, or N
  VARIANT 29: note = F or L
  VARIANT 30: note = S, E, R, K, G, T, A, or N
EVQLLESGGGLVQPGGSLRLSCAASGFXXX

SEQ ID NO: 332 - protein, 14 aa, synthetic construct
  source 1..14: note = 1A7 VH HFR2
  VARIANT 14: note = S or A
WVRQAPGKGLEWVX

SEQ ID NO: 333 - protein, 17 aa, synthetic construct
  source 1..17: note = 1A7 VH HCDR2
  VARIANT 1: note = T or S
  VARIANT 3: note = S, D, E, Y, or T
  VARIANT 4: note = G, D, E, A, Y, S, N, or T
  VARIANT 5: note = S, D, N, or G
  VARIANT 6: note = D, T, Y, S, or A
  VARIANT 7: note = D, T, Y, S, or A
  VARIANT 8: note = S, Y, A, T, D, or N
XIXXXXXXTYYADSVKG

SEQ ID NO: 334 - protein, 32 aa, synthetic construct
  source 1..32: note = 1A7 VH HFR3
RFTISRDNSKNTLYLQMNSLRAEDTAVYYCAK

SEQ ID NO: 335 - protein, 12 aa, synthetic construct
  source 1..12: note = 1A7 VH HCDR3
SGPGLRQVGFDY

SEQ ID NO: 336 - protein, 11 aa, synthetic construct
  source 1..11: note = 1A7 VH HFR4
WGQGTLVTVSS

SEQ ID NO: 337 - protein, 23 aa, synthetic construct
  source 1..23: note = 1A7 VL LFR1
DIQMTQSPSSLSASVGDRVTITC

SEQ ID NO: 338 - protein, 11 aa, synthetic construct
  source 1..11: note = 1A7 VL LCDR1
  VARIANT 8: note = S, A, D, G, H, K, N, Q, T, V, or Y
  VARIANT 9: note = Y, A, D, F, H, K, L, N, Q, S, or W
  VARIANT 11: note = N, A, D, G, H, Q, S, T, or Y
RASQSISXXLX

SEQ ID NO: 339 - protein, 15 aa, synthetic construct
  source 1..15: note = 1A7 VL LFR2
WYQQKPGKAPKLLIY

SEQ ID NO: 340 - protein, 32 aa, synthetic construct
  source 1..32: note = 1A7 VL LFR3
GVPSRFSGSGSGTDFTLTISSLQPEDFATYYC

SEQ ID NO: 341 - protein, 9 aa, synthetic construct
  source 1..9: note = 1A7 VL LCDR3
  VARIANT 3: note = S, A, D, F, H, K, L, T, V, or Y
  VARIANT 4: note = Y, A, D, F, H, K, L, Q, V, or W
  VARIANT 5: note = S, A, D, G, H, K, N, Q, T, V, or Y
  VARIANT 6: note = T, A, D, F, I, K, L, Q, S, V, or Y
  VARIANT 8: note = F, I, L, or W
QQXXXXPXT

SEQ ID NO: 342 - protein, 10 aa, synthetic construct
  source 1..10: note = 1A7 VL LFR4
FGQGTKLEIK

SEQ ID NO: 343 - protein, 121 aa, synthetic construct
  source 1..121: note = CD28.3[CD28]_H0L0 Variable heavy (vh) domain
EVKLQQSGAELVKPGASVRLSCKASGYTFTEYIIHWIKLRSGQGLEWIGWFYPGSNDIQYNAKFKGKATLTADKSSSTVYMELTGLTSEDSAVYFCARRDDFSGYDALPYWGQGTMVTVSS

SEQ ID NO: 344 - protein, 5 aa, synthetic construct
  source 1..5: note = CD28.3[CD28]_H0L0 vhCDR1
EYIIH

SEQ ID NO: 345 - protein, 17 aa, synthetic construct
  source 1..17: note = CD28.3[CD28]_H0L0 vhCDR2
WFYPGSNDIQYNAKFKG

SEQ ID NO: 346 - protein, 12 aa, synthetic construct
  source 1..12: note = CD28.3[CD28]_H0L0 vhCDR3
RDDFSGYDALPY

SEQ ID NO: 347 - protein, 107 aa, synthetic construct
  source 1..107: note = CD28.3[CD28]_H0L0 Variable light (vl) domain
DIQMTQSPASLSVSVGETVTITCRTNENIYSNLAWYQQKQGKSPQLLIYAATHLVEGVPSRFSGSGSGTQYSLKITSLQSEDFGNYYCQHFWGTPCTFGGGTKLEIK

SEQ ID NO: 348 - protein, 11 aa, synthetic construct
  source 1..11: note = CD28.3[CD28]_H0L0 vlCDR1
RTNENIYSNLA

SEQ ID NO: 349 - protein, 7 aa, synthetic construct
  source 1..7: note = CD28.3[CD28]_H0L0 vlCDR2
AATHLVE

SEQ ID NO: 350 - protein, 9 aa, synthetic construct
  source 1..9: note = CD28.3[CD28]_H0L0 vlCDR3
QHFWGTPCT

SEQ ID NO: 351 - protein, 121 aa, synthetic construct
  source 1..121: note = hCD28.3[CD28]_H1L1 Variable heavy (vh) domain
QVQLQQSGAELKKPGASVKVSCKASGYTFTEYIIHWIKLRSGQGLEWIGWFYPGSNDIQYNAQFKGKATLTADKSSSTVYMELTGLTPEDSAVYFCARRDDFSGYDALPYWGQGTLVTVSA

SEQ ID NO: 352 - protein, 5 aa, synthetic construct
  source 1..5: note = hCD28.3[CD28]_H1L1 vhCDR1
EYIIH

SEQ ID NO: 353 - protein, 17 aa, synthetic construct
  source 1..17: note = hCD28.3[CD28]_H1L1 vhCDR2
WFYPGSNDIQYNAQFKG

SEQ ID NO: 354 - protein, 12 aa, synthetic construct
  source 1..12: note = hCD28.3[CD28]_H1L1 vhCDR3
RDDFSGYDALPY

SEQ ID NO: 355 - protein, 107 aa, synthetic construct
  source 1..107: note = hCD28.3[CD28]_H1L1 Variable light (vl) domain
DIQMTQSPSSLSASVGDRVTITCKTNENIYSNLAWYQQKDGKSPQLLIYAATHLVEGVPSRFSGSGSGTQYSLTISSLQPEDFGNYYCQHFWGTPCTFGGGTKLEIK

SEQ ID NO: 356 - protein, 11 aa, synthetic construct
  source 1..11: note = hCD28.3[CD28]_H1L1 vlCDR1
KTNENIYSNLA

SEQ ID NO: 357 - protein, 7 aa, synthetic construct
  source 1..7: note = hCD28.3[CD28]_H1L1 vlCDR2
AATHLVE

SEQ ID NO: 358 - protein, 9 aa, synthetic construct
  source 1..9: note = hCD28.3[CD28]_H1L1 vlCDR3
QHFWGTPCT

SEQ ID NO: 359 - protein, 120 aa, synthetic construct
  source 1..120: note = 5.11A1[CD28]_H0L0 Variable heavy (vh) domain
QVQLQQSGPELVKPGTSVRISCEASGYTFTSYYIHWVKQRPGQGLEWIGCIYPGNVNTNYNEKFKDKATLIVDTSSNTAYMQLSRMTSEDSAVYFCTRSHYGLDWNFDVWGAGTTVTVSS

SEQ ID NO: 360 - protein, 5 aa, synthetic construct
  source 1..5: note = 5.11A1[CD28]_H0L0 vhCDR1
SYYIH

SEQ ID NO: 361 - protein, 17 aa, synthetic construct
  source 1..17: note = 5.11A1[CD28]_H0L0 vhCDR2
CIYPGNVNTNYNEKFKD

SEQ ID NO: 362 - protein, 11 aa, synthetic construct
  source 1..11: note = 5.11A1[CD28]_H0L0 vhCDR3
SHYGLDWNFDV

SEQ ID NO: 363 - protein, 107 aa, synthetic construct
  source 1..107: note = 5.11A1[CD28]_H0L0 Variable light (vl) domain
DIQMNQSPSSLSASLGDTITITCHASQNIYVWLNWYQQKPGNIPKLLIYKASNLHTGVPSRFSGSGSGTGFTLTISSLQPEDIATYYCQQGQTYPYTFGGGTKLEIK

SEQ ID NO: 364 - protein, 11 aa, synthetic construct
  source 1..11: note = 5.11A1[CD28]_H0L0 vlCDR1
HASQNIYVWLN

SEQ ID NO: 365 - protein, 7 aa, synthetic construct
  source 1..7: note = 5.11A1[CD28]_H0L0 vlCDR2
KASNLHT

SEQ ID NO: 366 - protein, 9 aa, synthetic construct
  source 1..9: note = 5.11A1[CD28]_H0L0 vlCDR3
QQGQTYPYT

SEQ ID NO: 367 - protein, 120 aa, synthetic construct
  source 1..120: note = TGN1412_H1L1 Variable heavy (vh) domain
QVQLVQSGAEVKKPGASVKVSCKASGYTFTSYYIHWVRQAPGQGLEWIGCIYPGNVNTNYNEKFKDRATLTVDTSISTAYMELSRLRSDDTAVYFCTRSHYGLDWNFDVWGQGTTVTVSS

SEQ ID NO: 368 - protein, 5 aa, synthetic construct
  source 1..5: note = TGN1412_H1L1 vhCDR1
SYYIH

SEQ ID NO: 369 - protein, 17 aa, synthetic construct
  source 1..17: note = TGN1412_H1L1 vhCDR2
CIYPGNVNTNYNEKFKD

SEQ ID NO: 370 - protein, 11 aa, synthetic construct
  source 1..11: note = TGN1412_H1L1 vhCDR3
SHYGLDWNFDV

SEQ ID NO: 371 - protein, 107 aa, synthetic construct
  source 1..107: note = TGN1412_H1L1 Variable light (vl) domain
DIQMTQSPSSLSASVGDRVTITCHASQNIYVWLNWYQQKPGKAPKLLIYKASNLHTGVPSRFSGSGSGTDFTLTISSLQPEDFATYYCQQGQTYPYTFGGGTKVEIK

SEQ ID NO: 372 - protein, 11 aa, synthetic construct
  source 1..11: note = TGN1412_H1L1 vlCDR1
HASQNIYVWLN

SEQ ID NO: 373 - protein, 7 aa, synthetic construct
  source 1..7: note = TGN1412_H1L1 vlCDR2
KASNLHT

SEQ ID NO: 374 - protein, 9 aa, synthetic construct
  source 1..9: note = TGN1412_H1L1 vlCDR3
QQGQTYPYT

SEQ ID NO: 375 - protein, 127 aa, synthetic construct
  source 1..127: note = 341VL34[CD28]_H1L1 Variable heavy (vh) domain
EVQLVESGGGLVKPGGSLRLSCGGSGFTFNNAWMNWVRQAPGKGLEWVGRIKGKTDGGTADYAAPVKGRFTISRDYSKNTLYLQMNSLTTEDTAVYYCNTDLPYYYGSGRYSGMDVWGQGTTVTVSS

SEQ ID NO: 376 - protein, 5 aa, synthetic construct
  source 1..5: note = 341VL34[CD28]_H1L1 vhCDR1
NAWMN

SEQ ID NO: 377 - protein, 19 aa, synthetic construct
  source 1..19: note = 341VL34[CD28]_H1L1 vhCDR2
RIKGKTDGGTADYAAPVKG

SEQ ID NO: 378 - protein, 16 aa, synthetic construct
  source 1..16: note = 341VL34[CD28]_H1L1 vhCDR3
DLPYYYGSGRYSGMDV

SEQ ID NO: 379 - protein, 104 aa, synthetic construct
  source 1..104: note = 341VL34[CD28]_H1L1 Variable light (vl) domain
EIVLTQSPATLSLSPGERATLSCRASQSVSSYLAWYQQKPGQAPRLLIYDASNRATGIPARFSGSGSGTDFTLTISSLEPEDFAVYYCQQRSNTFGPGTKVDIK

SEQ ID NO: 380 - protein, 11 aa, synthetic construct
  source 1..11: note = 341VL34[CD28]_H1L1 vlCDR1
RASQSVSSYLA

SEQ ID NO: 381 - protein, 7 aa, synthetic construct
  source 1..7: note = 341VL34[CD28]_H1L1 vlCDR2
DASNRAT

SEQ ID NO: 382 - protein, 6 aa, synthetic construct
  source 1..6: note = 341VL34[CD28]_H1L1 vlCDR3
QQRSNT

SEQ ID NO: 383 - protein, 127 aa, synthetic construct
  source 1..127: note = 341VL36[CD28]_H1L1 Variable heavy (vh) domain
EVQLVESGGGLVKPGGSLRLSCGGSGFTFNNAWMNWVRQAPGKGLEWVGRIKGKTDGGTADYAAPVKGRFTISRDYSKNTLYLQMNSLKTEDTGVYYCTTYLPYYYGSERWSGMDVWGQGTTVTVSS

SEQ ID NO: 384 - protein, 5 aa, synthetic construct
  source 1..5: note = 341VL36[CD28]_H1L1 vhCDR1
NAWMN

SEQ ID NO: 385 - protein, 19 aa, synthetic construct
  source 1..19: note = 341VL36[CD28]_H1L1 vhCDR2
RIKGKTDGGTADYAAPVKG

SEQ ID NO: 386 - protein, 16 aa, synthetic construct
  source 1..16: note = 341VL36[CD28]_H1L1 vhCDR3
YLPYYYGSERWSGMDV

SEQ ID NO: 387 - protein, 104 aa, synthetic construct; identical to SEQ ID NO: 379
  source 1..104: note = 341VL36[CD28]_H1L1 Variable light (vl) domain

SEQ ID NO: 388 - protein, 11 aa, synthetic construct
  source 1..11: note = 341VL36[CD28]_H1L1 vlCDR1
RASQSVSSYLA

SEQ ID NO: 389 - protein, 7 aa, synthetic construct
  source 1..7: note = 341VL36[CD28]_H1L1 vlCDR2
DASNRAT

SEQ ID NO: 390 - protein, 6 aa, synthetic construct
  source 1..6: note = 341VL36[CD28]_H1L1 vlCDR3
QQRSNT

SEQ ID NO: 391 - protein, 126 aa, synthetic construct
  source 1..126: note = 281VL4[CD28]_H1L1 Variable heavy (vh) domain
EVQLVQSGSELKKPGSSVKVSCKASGGTSRSFAISWVRQAPGQGLEWMGGIIPIFGPANYAQKFQGRVTITADESTSTAYMELSSLRSEDTAVYYCARHAIAMGWGVITTNYFDSWGQGTMVTVSS

SEQ ID NO: 392 - protein, 5 aa, synthetic construct
  source 1..5: note = 281VL4[CD28]_H1L1 vhCDR1
SFAIS

SEQ ID NO: 393 - protein, 17 aa, synthetic construct
  source 1..17: note = 281VL4[CD28]_H1L1 vhCDR2
GIIPIFGPANYAQKFQG

SEQ ID NO: 394 - protein, 17 aa, synthetic construct
  source 1..17: note = 281VL4[CD28]_H1L1 vhCDR3
HAIAMGWGVITTNYFDS

SEQ ID NO: 395 - protein, 108 aa, synthetic construct
  source 1..108: note = 281VL4[CD28]_H1L1 Variable light (vl) domain
EIVLTQSPGTLSLSPGERATLSCRASQSVSSSYLAWYQQKPGQAPRLLIYGASSRATGIPDRFSGSGSGTDFTLTISRLEPEDFAVYYCQQYGSSPITFGQGTRLEIK

SEQ ID NO: 396 - protein, 12 aa, synthetic construct
  source 1..12: note = 281VL4[CD28]_H1L1 vlCDR1
RASQSVSSSYLA

SEQ ID NO: 397 - protein, 7 aa, synthetic construct
  source 1..7: note = 281VL4[CD28]_H1L1 vlCDR2
GASSRAT

SEQ ID NO: 398 - protein, 9 aa, synthetic construct
  source 1..9: note = 281VL4[CD28]_H1L1 vlCDR3
QQYGSSPIT

SEQ ID NO: 399 - protein, 121 aa, synthetic construct
  source 1..121: note = HuTN228[CD28]_H1L1 Variable heavy (vh) domain
QVQLQESGPGLVKPSETLSLTCAVSGFSLTSYGVHWIRQPPGKGLEWLGVIWPGGGTNFNSALMSRLTISEDTSKNQVSLKLSSVTAADTAVYYCARDRAYGNYLYAMDYWGQGTLVTVSS

SEQ ID NO: 400 - protein, 5 aa, synthetic construct
  source 1..5: note = HuTN228[CD28]_H1L1 vhCDR1
SYGVH

SEQ ID NO: 401 - protein, 16 aa, synthetic construct
  source 1..16: note = HuTN228[CD28]_H1L1 vhCDR2
VIWPGGGTNFNSALMS

SEQ ID NO: 402 - protein, 13 aa, synthetic construct
  source 1..13: note = HuTN228[CD28]_H1L1 vhCDR3
DRAYGNYLYAMDY

SEQ ID NO: 403 - protein, 111 aa, synthetic construct
  source 1..111: note = HuTN228[CD28]_H1L1 Variable light (vl) domain
DIQMTQSPSSLSASVGDRVTITCRASESVEYYVTSLMQWYQQKPGKAPKLLIYAASNVDSGVPSRFSGSGSGTDFTLTISSLQPEDIATYYCQQSRKVPFTFGGGTKVEIK

SEQ ID NO: 404 - protein, 15 aa, synthetic construct
  source 1..15: note = HuTN228[CD28]_H1L1 vlCDR1
RASESVEYYVTSLMQ

SEQ ID NO: 405 - protein, 7 aa, synthetic construct
  source 1..7: note = HuTN228[CD28]_H1L1 vlCDR2
AASNVDS

SEQ ID NO: 406 - protein, 9 aa, synthetic construct
  source 1..9: note = HuTN228[CD28]_H1L1 vlCDR3
QQSRKVPFT

SEQ ID NO: 407 - protein, 124 aa, synthetic construct
  source 1..124: note = PV1[CD28]_H0L0 Variable heavy (vh) domain
QVQLKQSGAELVKPGASVKISCKTSGYTFTDGYMNWVEQKPGQGLEWIGRIDPDSGNTRYNQKFQGKATLTRDKSSSTVYMDLRSLTSEDSAVYYCARDGTFYGTYGYWYFDFWGQGTQVTVSS

SEQ ID NO: 408 - protein, 5 aa, synthetic construct
  source 1..5: note = PV1[CD28]_H0L0 vhCDR1
DGYMN

SEQ ID NO: 409 - protein, 17 aa, synthetic construct
  source 1..17: note = PV1[CD28]_H0L0 vhCDR2
RIDPDSGNTRYNQKFQG

SEQ ID NO: 410 - protein, 15 aa, synthetic construct
  source 1..15: note = PV1[CD28]_H0L0 vhCDR3
DGTFYGTYGYWYFDF

SEQ ID NO: 411 - protein, 113 aa, synthetic construct
  source 1..113: note = PV1[CD28]_H0L0 Variable light (vl) domain
DIVMTQSPYSLAVSAGEKVTMSCRSSQSLYYSGIKKNLLAWYQQKPGQSPKLLIYFTSTRLPGVPDRFTGSGSGTDYTLTITSVQAEDMGHYFCQQGISTPLTFGDGTKLEIR

SEQ ID NO: 412 - protein, 17 aa, synthetic construct
  source 1..17: note = PV1[CD28]_H0L0 vlCDR1
RSSQSLYYSGIKKNLLA

SEQ ID NO: 413 - protein, 7 aa, synthetic construct
  source 1..7: note = PV1[CD28]_H0L0 vlCDR2
FTSTRLP

SEQ ID NO: 414 - protein, 9 aa, synthetic construct
  source 1..9: note = PV1[CD28]_H0L0 vlCDR3
QQGISTPLT

SEQ ID NO: 415 - protein, 120 aa, synthetic construct
  source 1..120: note = m9.3[CD28]_H0L0 Variable heavy (vh) domain
EVKLQQSGPGLVTPSQSLSITCTVSGFSLSDYGVHWVRQSPGQGLEWLGVIWAGGGTNYNSALMSRKSISKDNSKSQVFLKMNSLQADDTAVYYCARDKGYSYYYSMDYWGQGTSVTVSS

SEQ ID NO: 416 - protein, 5 aa, synthetic construct
  source 1..5: note = m9.3[CD28]_H0L0 vhCDR1
DYGVH

SEQ ID NO: 417 - protein, 16 aa, synthetic construct
  source 1..16: note = m9.3[CD28]_H0L0 vhCDR2
VIWAGGGTNYNSALMS

SEQ ID NO: 418 - protein, 12 aa, synthetic construct
  source 1..12: note = m9.3[CD28]_H0L0 vhCDR3
DKGYSYYYSMDY

SEQ ID NO: 419 - protein, 111 aa, synthetic construct
  source 1..111: note = m9.3[CD28]_H0L0 Variable light (vl) domain
DIELTQSPASLAVSLGQRATISCRASESVEYYVTSLMQWYQQKPGQPPKLLIFAASNVESGVPARFSGSGSGTNFSLNIHPVDEDDVAMYFCQQSRKVPYTFGGGTKLEIK

SEQ ID NO: 420 - protein, 15 aa, synthetic construct
  source 1..15: note = m9.3[CD28]_H0L0 vlCDR1
RASESVEYYVTSLMQ

SEQ ID NO: 421 - protein, 7 aa, synthetic construct
  source 1..7: note = m9.3[CD28]_H0L0 vlCDR2
AASNVES

SEQ ID NO: 422 - protein, 9 aa, synthetic construct
  source 1..9: note = m9.3[CD28]_H0L0 vlCDR3
QQSRKVPYT

SEQ ID NO: 423 - protein, 120 aa, synthetic construct
  source 1..120: note = hu9.3[CD28]_H1L1 Variable heavy (vh) domain
EVQLVQSGGGLVQPGGSLRLSCAGSGFTFSDYGVHWVRQAPGKGLEWVSAIWAGGGTNYASSVMGRFTISRDNAKNSLYLQMNSLRAEDMAVYYCARDKGYSYYYSMDYWGQGTLVTVSS

SEQ ID NO: 424 - protein, 5 aa, synthetic construct
  source 1..5: note = hu9.3[CD28]_H1L1 vhCDR1
DYGVH

SEQ ID NO: 425 - protein, 16 aa, synthetic construct
  source 1..16: note = hu9.3[CD28]_H1L1 vhCDR2
AIWAGGGTNYASSVMG

SEQ ID NO: 426 - protein, 12 aa, synthetic construct
  source 1..12: note = hu9.3[CD28]_H1L1 vhCDR3
DKGYSYYYSMDY

SEQ ID NO: 427 - protein, 111 aa, synthetic construct
  source 1..111: note = hu9.3[CD28]_H1L1 Variable light (vl) domain
DIVMTQSPDSLAVSLGERATINCRASESVEYYVTSLMAWYQQKPGQPPKLLIYAASNVESGVPDRFSGSGSGTNFSLTISSLQAEDVAVYYCQQSRKVPYTFGQGTKLEIK

SEQ ID NO: 428 - protein, 15 aa, synthetic construct
  source 1..15: note = hu9.3[CD28]_H1L1 vlCDR1
RASESVEYYVTSLMA

SEQ ID NO: 429 - protein, 7 aa, synthetic construct
  source 1..7: note = hu9.3[CD28]_H1L1 vlCDR2
AASNVES

SEQ ID NO: 430 - protein, 9 aa, synthetic construct
  source 1..9: note = hu9.3[CD28]_H1L1 vlCDR3
QQSRKVPYT

SEQ ID NO: 431 - protein, 127 aa, synthetic construct
  source 1..127: note = 9G2[CD28]_H0L0 Variable heavy (vh) domain
EVQLVESGGGLVQPGRSLKLSCAASGFTFSNYYMAWVRQAPTKGLEWVASITNTGGSTYYRDSVKGRFTISRDNAKSTLYLQMDSLRSEDTATYYCTRGLIYYYDGRNYYDYVMDAWGQGASVTVSS

SEQ ID NO: 432 - protein, 5 aa, synthetic construct
  source 1..5: note = 9G2[CD28]_H0L0 vhCDR1
NYYMA

SEQ ID NO: 433 - protein, 17 aa, synthetic construct
  source 1..17: note = 9G2[CD28]_H0L0 vhCDR2
SITNTGGSTYYRDSVKG

SEQ ID NO: 434 - protein, 18 aa, synthetic construct
  source 1..18: note = 9G2[CD28]_H0L0 vhCDR3
GLIYYYDGRNYYDYVMDA

SEQ ID NO: 435 - protein, 107 aa, synthetic construct
  source 1..107: note = 9G2[CD28]_H0L0 Variable light (vl) domain
DIQMTQSPASLSASLGETVSIECLASEGISNSLAWYQQKPGKSPQLLIYGASSLQDGVPSRFSGSGSGTQYSLKISGMQPEDEGVYYCQQGYKYPLTFGSGTKLEIK

SEQ ID NO: 436 - protein, 11 aa, synthetic construct
  source 1..11: note = 9G2[CD28]_H0L0 vlCDR1
LASEGISNSLA

SEQ ID NO: 437 - protein, 7 aa, synthetic construct
  source 1..7: note = 9G2[CD28]_H0L0 vlCDR2
GASSLQD

SEQ ID NO: 438 - protein, 9 aa, synthetic construct
  source 1..9: note = 9G2[CD28]_H0L0 vlCDR3
QQGYKYPLT

SEQ ID NO: 439 - protein, 127 aa, synthetic construct
  source 1..127: note = 9G2[CD28]_H1L1 Variable heavy (vh) domain
EVQLLESGGGLVQPGGSLRLSCAASGFTFSNYYMAWVRQAPGKGLEWVSSITNTGGSTYYRDSVKGRFTISRDNSKSTLYLQMNSLRAEDTAVYYCTRGLIYYYDGRNYYDYVMDAWGQGTTVTVSS

SEQ ID NO: 440 - protein, 5 aa, synthetic construct
  source 1..5: note = 9G2[CD28]_H1L1 vhCDR1
NYYMA

SEQ ID NO: 441 - protein, 17 aa, synthetic construct
  source 1..17: note = 9G2[CD28]_H1L1 vhCDR2
SITNTGGSTYYRDSVKG

SEQ ID NO: 442 - protein, 18 aa, synthetic construct
  source 1..18: note = 9G2[CD28]_H1L1 vhCDR3
GLIYYYDGRNYYDYVMDA

SEQ ID NO: 443 - protein, 107 aa, synthetic construct
  source 1..107: note = 9G2[CD28]_H1L1 Variable light (vl) domain
DIQMTQSPSSLSASVGDRVTITCRASEGISNSLAWYQQKPGKSPKLLIYGASSLQDGVPSRFSGSGSGTDYTLTISSLQPEDFATYYCQQGYKYPLTFGSGTKVEIK

SEQ ID NO: 444 - protein, 11 aa, synthetic construct
  source 1..11: note = 9G2[CD28]_H1L1 vlCDR1
RASEGISNSLA

SEQ ID NO: 445 - protein, 7 aa, synthetic construct
  source 1..7: note = 9G2[CD28]_H1L1 vlCDR2
GASSLQD

SEQ ID NO: 446 - protein, 9 aa, synthetic construct
  source 1..9: note = 9G2[CD28]_H1L1 vlCDR3
QQGYKYPLT

SEQ ID NO: 447 - protein, 121 aa, synthetic construct
  source 1..121: note = 2F10A3.140[CD28]_H1L1 Variable heavy (vh) domain
EVQLLESGGGLVQPGGSLRLSCAASGFSFGGNSMSWVRQAPGKGLEWVATISDNSYSTYYADSVKGRFTISRDNSKNTLYLQMNSLRAEDTAVYYCAKSGPGLRQVGFDYWGQGTLVTVSS

SEQ ID NO: 448 - protein, 5 aa, synthetic construct
  source 1..5: note = 2F10A3.140[CD28]_H1L1 vhCDR1
GNSMS

SEQ ID NO: 449 - protein, 17 aa, synthetic construct
  source 1..17: note = 2F10A3.140[CD28]_H1L1 vhCDR2
TISDNSYSTYYADSVKG

SEQ ID NO: 450 - protein, 12 aa, synthetic construct
  source 1..12: note = 2F10A3.140[CD28]_H1L1 vhCDR3
SGPGLRQVGFDY

SEQ ID NO: 451 - protein, 107 aa, synthetic construct; identical to SEQ ID NO: 110
  source 1..107: note = 2F10A3.140[CD28]_H1L1 Variable light (vl) domain

SEQ ID NO: 452 - protein, 11 aa, synthetic construct
  source 1..11: note = 2F10A3.140[CD28]_H1L1 vlCDR1
RASQSISSYLN

SEQ ID NO: 453 - protein, 7 aa, synthetic construct
  source 1..7: note = 2F10A3.140[CD28]_H1L1 vlCDR2
AASSLQS

SEQ ID NO: 454 - protein, 9 aa, synthetic construct
  source 1..9: note = 2F10A3.140[CD28]_H1L1 vlCDR3
QQSYSTPFT

SEQ ID NO: 455 - protein, 121 aa, synthetic construct
  source 1..121: note = TN228[CD28]_H4L2 Variable heavy (vh) domain
QVQLQESGPGLVKPSETLSLTCTVSGFSLTSYGVHWVRQPPGKGLEWIGVIWPGGGTNYNSALKSRVTISEDTSKSQVSLKLSSVTAADTAVYYCARDRAYGNYLYAMDYWGQGTLVTVSS

SEQ ID NO: 456 - protein, 5 aa, synthetic construct
  source 1..5: note = TN228[CD28]_H4L2 vhCDR1
SYGVH

SEQ ID NO: 457 - protein, 16 aa, synthetic construct
  source 1..16: note = TN228[CD28]_H4L2 vhCDR2
VIWPGGGTNYNSALKS

SEQ ID NO: 458 - protein, 13 aa, synthetic construct
  source 1..13: note = TN228[CD28]_H4L2 vhCDR3
DRAYGNYLYAMDY

SEQ ID NO: 459 - protein, 111 aa, synthetic construct
  source 1..111: note = TN228[CD28]_H4L2 Variable light (vl) domain
EIVLTQSPATLSLSPGERATLSCRASESVEYYVTSLMQWYQQKPGQAPRLLIYAASNVDSGVPARFSGSGSGTDFTLTISSLEPEDFAVYYCQQSRKVPFTFGGGTKVEIK

SEQ ID NO: 460 - protein, 15 aa, synthetic construct
  source 1..15: note = TN228[CD28]_H4L2 vlCDR1
RASESVEYYVTSLMQ

SEQ ID NO: 461 - protein, 7 aa, synthetic construct
  source 1..7: note = TN228[CD28]_H4L2 vlCDR2
AASNVDS

SEQ ID NO: 462 - protein, 9 aa, synthetic construct
  source 1..9: note = TN228[CD28]_H4L2 vlCDR3
QQSRKVPFT

SEQ ID NO: 463 - protein, 124 aa, synthetic construct
  source 1..124: note = STEAP1-A_H0L0 Variable Heavy (vh) Domain
DVQVQESGPGLVKPSQSLSLTCTVTGYSITSDYAWNWIRQFPGNKLEWMGYISNSGSTSYNPSLKSRISITRDTSKNQFFLQLISVTTEDTATYYCARERNYDYDDYYYAMDYWGQGTTLTVSA

SEQ ID NO: 464 - protein, 6 aa, synthetic construct
  source 1..6: note = STEAP1-A_H0L0 vhCDR1
SDYAWN

SEQ ID NO: 465 - protein, 16 aa, synthetic construct
  source 1..16: note = STEAP1-A_H0L0 vhCDR2
YISNSGSTSYNPSLKS

SEQ ID NO: 466 - protein, 15 aa, synthetic construct
  source 1..15: note = STEAP1-A_H0L0 vhCDR3
ERNYDYDDYYYAMDY

SEQ ID NO: 467 - protein, 113 aa, synthetic construct
  source 1..113: note = STEAP1-A_H0L0 Variable Light (vl) Domain
DIVMSQSPSSLAVSVGEKVTMSCKSSQSLLYRSNQKNYLAWYQQKPGQSPKLLIYWASTRESGVPDRFTGSGSGTDFTLTISSVKAEDLAVYYCQQYYNYPRTFGGGTKVEIK

SEQ ID NO: 468 - protein, 17 aa, synthetic construct
  source 1..17: note = STEAP1-A_H0L0 vlCDR1
KSSQSLLYRSNQKNYLA

SEQ ID NO: 469 - protein, 7 aa, synthetic construct
  source 1..7: note = STEAP1-A_H0L0 vlCDR2
WASTRES

SEQ ID NO: 470 - protein, 9 aa, synthetic construct
  source 1..9: note = STEAP1-A_H0L0 vlCDR3
QQYYNYPRT

SEQ ID NO: 471 - protein, 124 aa, synthetic construct
  source 1..124: note = STEAP1-A_H1L1 Variable Heavy (vh) Domain
QVQVQESGPGLVKPSQTLSLTCTVSGYSITSDYAWNWIRQPPGKKLEWIGYISNSGSTSYNPSLKSRVTISRDTSKNQFSLKLSSVTAADTAVYYCARERNYDYDDYYYAMDYWGQGTLVTVSS

SEQ ID NO: 472 - protein, 6 aa, synthetic construct
  source 1..6: note = STEAP1-A_H1L1 vhCDR1
SDYAWN

SEQ ID NO: 473 - protein, 16 aa, synthetic construct
  source 1..16: note = STEAP1-A_H1L1 vhCDR2
YISNSGSTSYNPSLKS

SEQ ID NO: 474 - protein, 15 aa, synthetic construct
  source 1..15: note = STEAP1-A_H1L1 vhCDR3
ERNYDYDDYYYAMDY

SEQ ID NO: 475 - protein, 113 aa, synthetic construct
  source 1..113: note = STEAP1-A_H1L1 Variable Light (vl) Domain
DIVMTQSPDSLAVSLGERATINCKSSQSLLYRSNQKNYLAWYQQKPGQSPKLLIYWASTRESGVPDRFTGSGSGTDFTLTISSLQAEDVAVYYCQQYYNYPRTFGGGTKVEIK

SEQ ID NO: 476 - protein, 17 aa, synthetic construct
  source 1..17: note = STEAP1-A_H1L1 vlCDR1
KSSQSLLYRSNQKNYLA

SEQ ID NO: 477 - protein, 7 aa, synthetic construct
  source 1..7: note = STEAP1-A_H1L1 vlCDR2
WASTRES

SEQ ID NO: 478 - protein, 9 aa, synthetic construct
  source 1..9: note = STEAP1-A_H1L1 vlCDR3
QQYYNYPRT

SEQ ID NO: 479 - protein, 453 aa, synthetic construct
  source 1..453: note = XENP45527 Chain 1- STEAP1-A[STEAP1]_H0_Fab-IgG1_pI(-)_Isosteric_A_PVA_/S267K/L 368D/K370S
DVQVQESGPGLVKPSQSLSLTCTVTGYSITSDYAWNWIRQFPGNKLEWMGYISNSGSTSYNPSLKSRISITRDTSKNQFFLQLISVTTEDTATYYCARERNYDYDDYYYAMDYWGQGTTLTVSAASTKGPSVFPLAPSSKSTSGGTAALGCLVKDYFPEPVTVSWNSGALTSGVHTFPAVLQSSGLYSLSSVVTVPSSSLGTQTYICNVNHKPSDTKVDKKVEPKSCDKTHTCPPCPAPPVAGPSVFLFPPKPKDTLMISRTPEVTCVVVDVKHEDPEVKFNWYVDGVEVHNAKTKPREEEYNSTYRVVSVLTVLHQDWLNGKEYKCKVSNKALPAPIEKTISKAKGQPREPQVYTLPPSREEMTKNQVSLTCDVSGFYPSDIAVEWESDGQPENNYKTTPPVLDSDGSFFLYSKLTVDKSRWEQGDVFSCSVMHEALHNHYTQKSLSLSPGK

SEQ ID NO: 480 - protein, 479 aa, synthetic construct
  source 1..479: note = XENP45527 Chain 2- 1A7[CD28]_H1.14_L1.71_scFv(GKPGS)4-Fc(216)_IgG1_C220S/PVA_/ S267K/S364K/E357Q
EVQLLESGGGLVQPGGSLRLSCAASGFTFSSYYMSWVRQAPGKGLEWVSTISESGDSTYYADSVKGRFTISRDNSKNTLYLQMNSLRAEDTAVYYCAKSGPGLRQVGFDYWGQGTLVTVSSGKPGSGKPGSGKPGSGKPGSDIQMTQSPSSLSASVGDRVTITCRASQSISSYLNWYQQKPGKAPKLLIYAASSLQSGVPSRFSGSGSGTDFTLTISSLQPEDFATYYCQQVYSTPFTFGQGTKLEIKEPKSSDKTHTCPPCPAPPVAGPSVFLFPPKPKDTLMISRTPEVTCVVVDVKHEDPEVKFNWYVDGVEVHNAKTKPREEQYNSTYRVVSVLTVLHQDWLNGKEYKCKVSNKALPAPIEKTISKAKGQPREPQVYTLPPSREQMTKNQVKLTCLVKGFYPSDIAVEWESNGQPENNYKTTPPVLDSDGSFFLYSKLTVDKSRWQQGNVFSCSVMHEALHNHYTQKSLSLSPGK

SEQ ID NO: 481 - protein, 220 aa, synthetic construct
  source 1..220: note = XENP45527 Chain 3- STEAP1-A[STEAP1]_L0_Light Chain
DIVMSQSPSSLAVSVGEKVTMSCKSSQSLLYRSNQKNYLAWYQQKPGQSPKLLIYWASTRESGVPDRFTGSGSGTDFTLTISSVKAEDLAVYYCQQYYNYPRTFGGGTKVEIKRTVAAPSVFIFPPSDEQLKSGTASVVCLLNNFYPREAKVQWKVDNALQSGNSQESVTEQDSKDSTYSLSSTLTLSKADYEKHKVYACEVTHQGLSSPVTKSFNRGEC

SEQ ID NO: 482 - protein, 453 aa, synthetic construct
  source 1..453: note = XENP44652 Chain 1- STEAP1-A[STEAP1]_H1_Fab-IgG1_pI(-)_Isosteric_A_PVA_/S267K/L 368D/K370S
QVQVQESGPGLVKPSQTLSLTCTVSGYSITSDYAWNWIRQPPGKKLEWIGYISNSGSTSYNPSLKSRVTISRDTSKNQFSLKLSSVTAADTAVYYCARERNYDYDDYYYAMDYWGQGTLVTVSSASTKGPSVFPLAPSSKSTSGGTAALGCLVKDYFPEPVTVSWNSGALTSGVHTFPAVLQSSGLYSLSSVVTVPSSSLGTQTYICNVNHKPSDTKVDKKVEPKSCDKTHTCPPCPAPPVAGPSVFLFPPKPKDTLMISRTPEVTCVVVDVKHEDPEVKFNWYVDGVEVHNAKTKPREEEYNSTYRVVSVLTVLHQDWLNGKEYKCKVSNKALPAPIEKTISKAKGQPREPQVYTLPPSREEMTKNQVSLTCDVSGFYPSDIAVEWESDGQPENNYKTTPPVLDSDGSFFLYSKLTVDKSRWEQGDVFSCSVMHEALHNHYTQKSLSLSPGK

SEQ ID NO: 483 - protein, 479 aa, synthetic construct; identical to SEQ ID NO: 480
  source 1..479: note = XENP44652 Chain 2- 1A7[CD28]_H1.14_L1.71_scFv(GKPGS)4-Fc(216)_IgG1_C220S/PVA_/ S267K/S364K/E357Q

SEQ ID NO: 484 - protein, 220 aa, synthetic construct
  source 1..220: note = XENP44652 Chain 3- STEAP1-A[STEAP1]_L1_Light Chain
DIVMTQSPDSLAVSLGERATINCKSSQSLLYRSNQKNYLAWYQQKPGQSPKLLIYWASTRESGVPDRFTGSGSGTDFTLTISSLQAEDVAVYYCQQYYNYPRTFGGGTKVEIKRTVAAPSVFIFPPSDEQLKSGTASVVCLLNNFYPREAKVQWKVDNALQSGNSQESVTEQDSKDSTYSLSSTLTLSKADYEKHKVYACEVTHQGLSSPVTKSFNRGEC

SEQ ID NO: 485 - protein, 453 aa, synthetic construct; identical to SEQ ID NO: 482
  source 1..453: note = XENP46213 Chain 1- STEAP-A[STEAP1]_H1_Fab-IgG1_pI(-)_Isosteric_A_PVA_/S267K/L3 68D/K370S

SEQ ID NO: 486 - protein, 479 aa, synthetic construct; identical to SEQ ID NO: 480
  source 1..479: note = XENP46213 Chain 2- 1A7[CD28]_H1.14_L1.71_scFv(GKPGS)4- Fc(216)_IgG1_C220S/PVA_/S267K/S364K/E357Q

SEQ ID NO: 487 - protein, 220 aa, synthetic construct
  source 1..220: note = XENP46213 Chain 3-STEAP-A[STEAP1]_L1.47_Light Chain
DIVMTQSPDSLAVSLGERATINCKSSQSLLYRSNQRNYLAWYQQKPGQSPKLLIYWASTRESGVPDRFTGSGSGTDFTLTISSLQAEDVAVYYCQQYYNYPRTFGGGTKVEIKRTVAAPSVFIFPPSDEQLKSGTASVVCLLNNFYPREAKVQWKVDNALQSGNSQESVTEQDSKDSTYSLSSTLTLSKADYEKHKVYACEVTHQGLSSPVTKSFNRGEC

SEQ ID NO: 488 - protein, 453 aa, synthetic construct; identical to SEQ ID NO: 482
  source 1..453: note = XENP46214 Chain 1- STEAP-A[STEAP1]_H1_Fab-IgG1_pI(-)_Isosteric_A_PVA_/S267K/L3 68D/K370S

SEQ ID NO: 489 - protein, 479 aa, synthetic construct; identical to SEQ ID NO: 480
  source 1..479: note = XENP46214 Chain 2- 1A7[CD28]_H1.14_L1.71_scFv(GKPGS)4- Fc(216)_IgG1_C220S/PVA_/S267K/S364K/E357Q

SEQ ID NO: 490 - protein, 220 aa, synthetic construct
  source 1..220: note = XENP46214 Chain 3-STEAP-A[STEAP1]_L1.56_Light Chain
DIVMTQSPDSLAVSLGERATINCKSSQSLLYRSNQKNYLAWYQQKPGQSPKLLIYWAYTRESGVPDRFTGSGSGTDFTLTISSLQAEDVAVYYCQQYYNYPRTFGGGTKVEIKRTVAAPSVFIFPPSDEQLKSGTASVVCLLNNFYPREAKVQWKVDNALQSGNSQESVTEQDSKDSTYSLSSTLTLSKADYEKHKVYACEVTHQGLSSPVTKSFNRGEC

SEQ ID NO: 491 - protein, 453 aa, synthetic construct; identical to SEQ ID NO: 482
  source 1..453: note = XENP46796 Chain 1-  STEAP-A[STEAP1]_H1_IgG1_pI(-)_Iso steric_A_PVA_/S267K/L368D/K370S

SEQ ID NO: 492 - protein, 479 aa, synthetic construct
  source 1..479: note = XENP46796 Chain 2- 1A7[CD28]_H1.129_L1.71_scFv(GKPGS)4-Fc(216)_IgG1_C220S/PVA_ /S267K/S364K/E357Q
EVQLLESGGGLVQPGGSLRLSCAASGFTFSSYYMSWVRQAPGKCLEWVSTISERADSTYYADSVKGRFTISRDNSKNTLYLQMNSLRAEDTAVYYCAKSGPGLRQVGFDYWGQGTLVTVSSGKPGSGKPGSGKPGSGKPGSDIQMTQSPSSLSASVGDRVTITCRASQSISSYLNWYQQKPGKAPKLLIYAASSLQSGVPSRFSGSGSGTDFTLTISSLQPEDFATYYCQQVYSTPFTFGCGTKLEIKEPKSSDKTHTCPPCPAPPVAGPSVFLFPPKPKDTLMISRTPEVTCVVVDVKHEDPEVKFNWYVDGVEVHNAKTKPREEQYNSTYRVVSVLTVLHQDWLNGKEYKCKVSNKALPAPIEKTISKAKGQPREPQVYTLPPSREQMTKNQVKLTCLVKGFYPSDIAVEWESNGQPENNYKTTPPVLDSDGSFFLYSKLTVDKSRWQQGNVFSCSVMHEALHNHYTQKSLSLSPGK

SEQ ID NO: 493 - protein, 220 aa, synthetic construct
  source 1..220: note = XENP46796 Chain 3-  STEAP-A[STEAP1]_L1.115_Light Chain
DIVMTQSPDSLAVSLGERATINCKSSQTLLYRSNQKNYLAWYQQKPGQPPKLLIYWAYTRESGVPDRFSGSGSGTDFTLTISSLQAEDVAVYYCQQYYKYPRTFGGGTKVEIKRTVAAPSVFIFPPSDEQLKSGTASVVCLLNNFYPREAKVQWKVDNALQSGNSQESVTEQDSKDSTYSLSSTLTLSKADYEKHKVYACEVTHQGLSSPVTKSFNRGEC

SEQ ID NO: 494 - protein, 453 aa, synthetic construct; identical to SEQ ID NO: 482
  source 1..453: note = XENP46797 Chain 1-  STEAP-A[STEAP1]_H1_IgG1_pI(-)_Iso steric_A_PVA_/S267K/L368D/K370S

SEQ ID NO: 495 - protein, 479 aa, synthetic construct
  source 1..479: note = XENP46797 Chain 2- 1A7[CD28]_H1.129_L1_scFv(GKPGS)4-Fc(216)_IgG1_C220S/PVA_/S2 67K/S364K/E357Q
EVQLLESGGGLVQPGGSLRLSCAASGFTFSSYYMSWVRQAPGKCLEWVSTISERADSTYYADSVKGRFTISRDNSKNTLYLQMNSLRAEDTAVYYCAKSGPGLRQVGFDYWGQGTLVTVSSGKPGSGKPGSGKPGSGKPGSDIQMTQSPSSLSASVGDRVTITCRASQSISSYLNWYQQKPGKAPKLLIYAASSLQSGVPSRFSGSGSGTDFTLTISSLQPEDFATYYCQQSYSTPFTFGCGTKLEIKEPKSSDKTHTCPPCPAPPVAGPSVFLFPPKPKDTLMISRTPEVTCVVVDVKHEDPEVKFNWYVDGVEVHNAKTKPREEQYNSTYRVVSVLTVLHQDWLNGKEYKCKVSNKALPAPIEKTISKAKGQPREPQVYTLPPSREQMTKNQVKLTCLVKGFYPSDIAVEWESNGQPENNYKTTPPVLDSDGSFFLYSKLTVDKSRWQQGNVFSCSVMHEALHNHYTQKSLSLSPGK

SEQ ID NO: 496 - protein, 220 aa, synthetic construct; identical to SEQ ID NO: 493
  source 1..220: note = XENP46797 Chain 3-  STEAP-A[STEAP1]_L1.115_Light Chain

SEQ ID NO: 497 - protein, 453 aa, synthetic construct; identical to SEQ ID NO: 482
  source 1..453: note = XENP46798 Chain 1-  STEAP-A[STEAP1]_H1_IgG1_pI(-)_Iso steric_A_PVA_/S267K/L368D/K370S

SEQ ID NO: 498 - protein, 479 aa, synthetic construct
  source 1..479: note = XENP46798 Chain 2- 1A7[CD28]_H1.14_L1.71_scFv(GKPGS)4-Fc(216)_IgG1_C220S/PVA_/ S267K/S364K/E357Q
EVQLLESGGGLVQPGGSLRLSCAASGFTFSSYYMSWVRQAPGKCLEWVSTISESGDSTYYADSVKGRFTISRDNSKNTLYLQMNSLRAEDTAVYYCAKSGPGLRQVGFDYWGQGTLVTVSSGKPGSGKPGSGKPGSGKPGSDIQMTQSPSSLSASVGDRVTITCRASQSISSYLNWYQQKPGKAPKLLIYAASSLQSGVPSRFSGSGSGTDFTLTISSLQPEDFATYYCQQVYSTPFTFGCGTKLEIKEPKSSDKTHTCPPCPAPPVAGPSVFLFPPKPKDTLMISRTPEVTCVVVDVKHEDPEVKFNWYVDGVEVHNAKTKPREEQYNSTYRVVSVLTVLHQDWLNGKEYKCKVSNKALPAPIEKTISKAKGQPREPQVYTLPPSREQMTKNQVKLTCLVKGFYPSDIAVEWESNGQPENNYKTTPPVLDSDGSFFLYSKLTVDKSRWQQGNVFSCSVMHEALHNHYTQKSLSLSPGK

SEQ ID NO: 499 - protein, 220 aa, synthetic construct; identical to SEQ ID NO: 493
  source 1..220: note = XENP46798 Chain 3-  STEAP-A[STEAP1]_L1.115_Light Chain

SEQ ID NO: 500 - protein, 453 aa, synthetic construct
  source 1..453: note = XENP46850 Chain 1-  STEAP-A[STEAP1]_H1.228_IgG1_pI(-) _Isosteric_A_PVA_/S267K/L368D/K370S/M428L/N434S
QVQVQESGPGLVKPSQTLSLTCTVSGYSITSDYSWNWIRQPPGKKLEWIGYIGNSGSTVYNPSLKSRVTISRDTSKNQFSLKLSSVTAADTAVYYCARERNYDYELYYYAMDYWGQGTLVTVSSASTKGPSVFPLAPSSKSTSGGTAALGCLVKDYFPEPVTVSWNSGALTSGVHTFPAVLQSSGLYSLSSVVTVPSSSLGTQTYICNVNHKPSDTKVDKKVEPKSCDKTHTCPPCPAPPVAGPSVFLFPPKPKDTLMISRTPEVTCVVVDVKHEDPEVKFNWYVDGVEVHNAKTKPREEEYNSTYRVVSVLTVLHQDWLNGKEYKCKVSNKALPAPIEKTISKAKGQPREPQVYTLPPSREEMTKNQVSLTCDVSGFYPSDIAVEWESDGQPENNYKTTPPVLDSDGSFFLYSKLTVDKSRWEQGDVFSCSVLHEALHSHYTQKSLSLSPGK

SEQ ID NO: 501 - protein, 479 aa, synthetic construct
  source 1..479: note = XENP46850 Chain 2- 1A7[CD28]_H1.129_L1_VH_G46C_VL_Q108C_scFv(GKPGS)4-Fc(216)_I gG1_C220S/PVA_/S267K/S364K/E357Q/M428L/N434S
EVQLLESGGGLVQPGGSLRLSCAASGFTFSSYYMSWVRQAPGKCLEWVSTISERADSTYYADSVKGRFTISRDNSKNTLYLQMNSLRAEDTAVYYCAKSGPGLRQVGFDYWGQGTLVTVSSGKPGSGKPGSGKPGSGKPGSDIQMTQSPSSLSASVGDRVTITCRASQSISSYLNWYQQKPGKAPKLLIYAASSLQSGVPSRFSGSGSGTDFTLTISSLQPEDFATYYCQQSYSTPFTFGCGTKLEIKEPKSSDKTHTCPPCPAPPVAGPSVFLFPPKPKDTLMISRTPEVTCVVVDVKHEDPEVKFNWYVDGVEVHNAKTKPREEQYNSTYRVVSVLTVLHQDWLNGKEYKCKVSNKALPAPIEKTISKAKGQPREPQVYTLPPSREQMTKNQVKLTCLVKGFYPSDIAVEWESNGQPENNYKTTPPVLDSDGSFFLYSKLTVDKSRWQQGNVFSCSVLHEALHSHYTQKSLSLSPGK

SEQ ID NO: 502 - protein, 220 aa, synthetic construct; identical to SEQ ID NO: 493
  source 1..220: note = XENP46850 Chain 3-  STEAP-A[STEAP1]_L1.115_Light Chain

SEQ ID NO: 503 - protein, 453 aa, synthetic construct
  source 1..453: note = XENP47235 Chain 1-  STEAP-A[STEAP1]_H1.230_IgG1_pI(-) _Isosteric_A_PVA_/S267K/L368D/K370S/M428L/N434S
QVQVQESGPGLVKPSQTLSLTCTVSGYSITSDYSWNWIRQPPGKKLEWIGYIGTSGSTVYNPSLKSRVTISRDTSKNQFSLKLSSVTAADTAVYYCARERNYDYELYYYAMDYWGQGTLVTVSSASTKGPSVFPLAPSSKSTSGGTAALGCLVKDYFPEPVTVSWNSGALTSGVHTFPAVLQSSGLYSLSSVVTVPSSSLGTQTYICNVNHKPSDTKVDKKVEPKSCDKTHTCPPCPAPPVAGPSVFLFPPKPKDTLMISRTPEVTCVVVDVKHEDPEVKFNWYVDGVEVHNAKTKPREEEYNSTYRVVSVLTVLHQDWLNGKEYKCKVSNKALPAPIEKTISKAKGQPREPQVYTLPPSREEMTKNQVSLTCDVSGFYPSDIAVEWESDGQPENNYKTTPPVLDSDGSFFLYSKLTVDKSRWEQGDVFSCSVLHEALHSHYTQKSLSLSPGK

SEQ ID NO: 504 - protein, 479 aa, synthetic construct; identical to SEQ ID NO: 501
  source 1..479: note = XENP47235 Chain 2- 1A7[CD28]_H1.129_L1_VH_G46C_VL_Q108C_scFv(GKPGS)4-Fc(216)_I gG1_C220S/PVA_/S267K/S364K/E357Q/M428L/N434S

SEQ ID NO: 505 - protein, 220 aa, synthetic construct; identical to SEQ ID NO: 493
  source 1..220: note = XENP47235 Chain 3-  STEAP-A[STEAP1]_L1.115_Light Chain

SEQ ID NO: 506 - protein, 449 aa, synthetic construct
  source 1..449: note = XENP48032 Chain 1- Numax_Fab-IgG1_pI(-)_Isosteric_A_PVA_/S267K/L368D/K370S/M42 8L/N434S
QVTLRESGPALVKPTQTLTLTCTFSGFSLSTAGMSVGWIRQPPGKALEWLADIWWDDKKHYNPSLKDRLTISKDTSKNQVVLKVTNMDPADTATYYCARDMIFNFYFDVWGQGTTVTVSSASTKGPSVFPLAPSSKSTSGGTAALGCLVKDYFPEPVTVSWNSGALTSGVHTFPAVLQSSGLYSLSSVVTVPSSSLGTQTYICNVNHKPSDTKVDKKVEPKSCDKTHTCPPCPAPPVAGPSVFLFPPKPKDTLMISRTPEVTCVVVDVKHEDPEVKFNWYVDGVEVHNAKTKPREEEYNSTYRVVSVLTVLHQDWLNGKEYKCKVSNKALPAPIEKTISKAKGQPREPQVYTLPPSREEMTKNQVSLTCDVSGFYPSDIAVEWESDGQPENNYKTTPPVLDSDGSFFLYSKLTVDKSRWEQGDVFSCSVLHEALHSHYTQKSLSLSPGK

SEQ ID NO: 507 - protein, 479 aa, synthetic construct; identical to SEQ ID NO: 501
  source 1..479: note = XENP48032 Chain 2- 1A7[CD28]_H1.129_L1_VH_G46C_VL_Q108C_scFv(GKPGS)4-Fc(216)_I gG1_C220S/PVA_/S267K/S364K/E357Q/M428L/N434S

SEQ ID NO: 508 - protein, 213 aa, synthetic construct
  source 1..213: note = XENP48032 Chain 3- Numax_Light Chain
DIQMTQSPSTLSASVGDRVTITCSASSRVGYMHWYQQKPGKAPKLLIYDTSKLASGVPSRFSGSGSGTEFTLTISSLQPDDFATYYCFQGSGYPFTFGGGTKVEIKRTVAAPSVFIFPPSDEQLKSGTASVVCLLNNFYPREAKVQWKVDNALQSGNSQESVTEQDSKDSTYSLSSTLTLSKADYEKHKVYACEVTHQGLSSPVTKSFNRGEC

SEQ ID NO: 509 - protein, 453 aa, synthetic construct; identical to SEQ ID NO: 503
  source 1..453: note = XENP47236 Chain 1-  STEAP-A[STEAP1]_H1.230_IgG1_pI(-) _Isosteric_A_PVA_/S267K/L368D/K370S/M428L/N434S

SEQ ID NO: 510 - protein, 479 aa, synthetic construct; identical to SEQ ID NO: 492
  source 1..479: note = XENP47236 Chain 2- 1A7[CD28]_H1.129_L1.71_VH_G46C_VL_Q108C_scFv(GKPGS)4-Fc(216 )_IgG1_C220S/PVA_/S267K/S364K/E357Q/M428L/N434S

SEQ ID NO: 511 - protein, 220 aa, synthetic construct; identical to SEQ ID NO: 493
  source 1..220: note = XENP47236 Chain 3-  STEAP-A[STEAP1]_L1.115_Light Chain

SEQ ID NO: 512 - protein, 453 aa, synthetic construct; identical to SEQ ID NO: 503
  source 1..453: note = XENP47237 Chain 1-  STEAP-A[STEAP1]_H1.230_IgG1_pI(-) _Isosteric_A_PVA_/S267K/L368D/K370S/M428L/N434S

SEQ ID NO: 513 - protein, 479 aa, synthetic construct; identical to SEQ ID NO: 501
  source 1..479: note = XENP47237 Chain 2- 1A7[CD28]_H1.129_L1_VH_G46C_VL_Q108C_scFv(GKPGS)4-Fc(216)_I gG1_C220S/PVA_/S267K/S364K/E357Q/M428L/N434S

SEQ ID NO: 514 - protein, 220 aa, synthetic construct
  source 1..220: note = XENP47237 Chain 3-  STEAP-A[STEAP1]_L1.100_Light Chain
DIVMTQSPDSLAVSLGERATINCKSSQTLLYRSNQKNYLAWYQQKPGQPPKLLIYWAYTRESGVPDRFSGSGSGTDFTLTISSLQAEDVAVYYCQQYYNYPRTFGGGTKVEIKRTVAAPSVFIFPPSDEQLKSGTASVVCLLNNFYPREAKVQWKVDNALQSGNSQESVTEQDSKDSTYSLSSTLTLSKADYEKHKVYACEVTHQGLSSPVTKSFNRGEC

SEQ ID NO: 515 - protein, 453 aa, synthetic construct; identical to SEQ ID NO: 503
  source 1..453: note = XENP47238 Chain 1-  STEAP-A[STEAP1]_H1.230_IgG1_pI(-) _Isosteric_A_PVA_/S267K/L368D/K370S/M428L/N434S

SEQ ID NO: 516 - protein, 479 aa, synthetic construct; identical to SEQ ID NO: 492
  source 1..479: note = XENP47238 Chain 2- 1A7[CD28]_H1.129_L1.71_VH_G46C_VL_Q108C_scFv(GKPGS)4-Fc(216 )_IgG1_C220S/PVA_/S267K/S364K/E357Q/M428L/N434S

SEQ ID NO: 517 - protein, 220 aa, synthetic construct; identical to SEQ ID NO: 514
  source 1..220: note = XENP47238 Chain 3-  STEAP-A[STEAP1]_L1.100_Light Chain

SEQ ID NO: 518 - protein, 453 aa, synthetic construct; identical to SEQ ID NO: 503
  source 1..453: note = XENP47412 Chain 1-  STEAP-A[STEAP1]_H1.230_IgG1_pI(-) _Isosteric_A_PVA_/S267K/L368D/K370S/M428L/N434S

SEQ ID NO: 519 - protein, 479 aa, synthetic construct
  source 1..479: note = XENP47412 Chain 2- 1A7[CD28]_H1.14_L1.71_VH_G46C_VL_Q108C_scFv(GKPGS)4-Fc(216) _IgG1_C220S/PVA_/S267K/S364K/E357Q/M428L/N434S
EVQLLESGGGLVQPGGSLRLSCAASGFTFSSYYMSWVRQAPGKCLEWVSTISESGDSTYYADSVKGRFTISRDNSKNTLYLQMNSLRAEDTAVYYCAKSGPGLRQVGFDYWGQGTLVTVSSGKPGSGKPGSGKPGSGKPGSDIQMTQSPSSLSASVGDRVTITCRASQSISSYLNWYQQKPGKAPKLLIYAASSLQSGVPSRFSGSGSGTDFTLTISSLQPEDFATYYCQQVYSTPFTFGCGTKLEIKEPKSSDKTHTCPPCPAPPVAGPSVFLFPPKPKDTLMISRTPEVTCVVVDVKHEDPEVKFNWYVDGVEVHNAKTKPREEQYNSTYRVVSVLTVLHQDWLNGKEYKCKVSNKALPAPIEKTISKAKGQPREPQVYTLPPSREQMTKNQVKLTCLVKGFYPSDIAVEWESNGQPENNYKTTPPVLDSDGSFFLYSKLTVDKSRWQQGNVFSCSVLHEALHSHYTQKSLSLSPGK

SEQ ID NO: 520 - protein, 220 aa, synthetic construct; identical to SEQ ID NO: 493
  source 1..220: note = XENP47412 Chain 3-  STEAP-A[STEAP1]_L1.115_Light Chain

SEQ ID NO: 521 - protein, 453 aa, synthetic construct; identical to SEQ ID NO: 503
  source 1..453: note = XENP47413 Chain 1-  STEAP-A[STEAP1]_H1.230_IgG1_pI(-) _Isosteric_A_PVA_/S267K/L368D/K370S/M428L/N434S

SEQ ID NO: 522 - protein, 479 aa, synthetic construct; identical to SEQ ID NO: 519
  source 1..479: note = XENP47413 Chain 2- 1A7[CD28]_H1.14_L1.71_VH_G46C_VL_Q108C_scFv(GKPGS)4-Fc(216) _IgG1_C220S/PVA_/S267K/S364K/E357Q/M428L/N434S

SEQ ID NO: 523 - protein, 220 aa, synthetic construct; identical to SEQ ID NO: 514
  source 1..220: note = XENP47413 Chain 3-  STEAP-A[STEAP1]_L1.100_Light Chain

SEQ ID NO: 524 - protein, 254 aa, synthetic construct
  source 1..254: note = CD3 High - [anti-CD3]_H1.30_L1.47_scFv scFv
EVQLVESGGGLVQPGGSLRLSCAASGFTFSTYAMNWVRQAPGKGLEWVGRIRSKYNNYATYYADSVKGRFTISRDDSKNTLYLQMNSLRAEDTAVYYCVRHGNFGDSYVSWFAYWGQGTLVTVSSGKPGSGKPGSGKPGSGKPGSQAVVTQEPSLTVSPGGTVTLTCGSSTGAVTTSNYANWVQQKPGKSPRGLIGGTNKRAPGVPARFSGSLLGGKAALTISGAQPEDEADYYCALWYSNHWVFGGGTKLTVL

SEQ ID NO: 525 - protein, 125 aa, synthetic construct
  source 1..125: note = CD3 High - [anti-CD3]_H1.30_L1.47_scFv Variable Heavy (vh) Domain
EVQLVESGGGLVQPGGSLRLSCAASGFTFSTYAMNWVRQAPGKGLEWVGRIRSKYNNYATYYADSVKGRFTISRDDSKNTLYLQMNSLRAEDTAVYYCVRHGNFGDSYVSWFAYWGQGTLVTVSS

SEQ ID NO: 526 - protein, 5 aa, synthetic construct
  source 1..5: note = CD3 High - [anti-CD3]_H1.30_L1.47_scFv vhCDR1
TYAMN

SEQ ID NO: 527 - protein, 19 aa, synthetic construct
  source 1..19: note = CD3 High - [anti-CD3]_H1.30_L1.47_scFv vhCDR2
RIRSKYNNYATYYADSVKG

SEQ ID NO: 528 - protein, 14 aa, synthetic construct
  source 1..14: note = CD3 High - [anti-CD3]_H1.30_L1.47_scFv vhCDR3
HGNFGDSYVSWFAY

SEQ ID NO: 529 - protein, 109 aa, synthetic construct
  source 1..109: note = CD3 High - [anti-CD3]_H1.30_L1.47_scFv Variable Light (vl) Domain
QAVVTQEPSLTVSPGGTVTLTCGSSTGAVTTSNYANWVQQKPGKSPRGLIGGTNKRAPGVPARFSGSLLGGKAALTISGAQPEDEADYYCALWYSNHWVFGGGTKLTVL

SEQ ID NO: 530 - protein, 14 aa, synthetic construct
  source 1..14: note = CD3 High - [anti-CD3]_H1.30_L1.47_scFv vlCDR1
GSSTGAVTTSNYAN

SEQ ID NO: 531 - protein, 7 aa, synthetic construct
  source 1..7: note = CD3 High - [anti-CD3]_H1.30_L1.47_scFv vlCDR2
GTNKRAP

SEQ ID NO: 532 - protein, 9 aa, synthetic construct
  source 1..9: note = CD3 High - [anti-CD3]_H1.30_L1.47_scFv vlCDR3
ALWYSNHWV

SEQ ID NO: 533 - protein, 20 aa, synthetic construct
  source 1..20: note = CD3 High - [anti-CD3]_H1.30_L1.47_scFv Linker
GKPGSGKPGSGKPGSGKPGS

SEQ ID NO: 534 - protein, 254 aa, synthetic construct
  source 1..254: note = CD3 High-Int #1 - [anti-CD3]_H1.32_L1.47_scFv scFv
EVQLVESGGGLVQPGGSLRLSCAASGFTFSTYAMNWVRQAPGKGLEWVGRIRSKANNYATYYADSVKGRFTISRDDSKNTLYLQMNSLRAEDTAVYYCVRHGNFGDSYVSWFAYWGQGTLVTVSSGKPGSGKPGSGKPGSGKPGSQAVVTQEPSLTVSPGGTVTLTCGSSTGAVTTSNYANWVQQKPGKSPRGLIGGTNKRAPGVPARFSGSLLGGKAALTISGAQPEDEADYYCALWYSNHWVFGGGTKLTVL

SEQ ID NO: 535 - protein, 125 aa, synthetic construct
  source 1..125: note = CD3 High-Int #1 - [anti-CD3]_H1.32_L1.47_scFv Variable Heavy (vh) Domain
EVQLVESGGGLVQPGGSLRLSCAASGFTFSTYAMNWVRQAPGKGLEWVGRIRSKANNYATYYADSVKGRFTISRDDSKNTLYLQMNSLRAEDTAVYYCVRHGNFGDSYVSWFAYWGQGTLVTVSS

SEQ ID NO: 536 - protein, 5 aa, synthetic construct
  source 1..5: note = CD3 High-Int #1 - [anti-CD3]_H1.32_L1.47_scFv vhCDR1
TYAMN

SEQ ID NO: 537 - protein, 19 aa, synthetic construct
  source 1..19: note = CD3 High-Int #1 - [anti-CD3]_H1.32_L1.47_scFv vhCDR2
RIRSKANNYATYYADSVKG

SEQ ID NO: 538 - protein, 14 aa, synthetic construct
  source 1..14: note = CD3 High-Int #1 - [anti-CD3]_H1.32_L1.47_scFv vhCDR3
HGNFGDSYVSWFAY

SEQ ID NO: 539 - protein, 109 aa, synthetic construct; identical to SEQ ID NO: 529
  source 1..109: note = CD3 High-Int #1 - [anti-CD3]_H1.32_L1.47_scFv Variable Light (vl) Domain

SEQ ID NO: 540 - protein, 14 aa, synthetic construct
  source 1..14: note = CD3 High-Int #1 - [anti-CD3]_H1.32_L1.47_scFv vlCDR1
GSSTGAVTTSNYAN

SEQ ID NO: 541 - protein, 7 aa, synthetic construct
  source 1..7: note = CD3 High-Int #1 - [anti-CD3]_H1.32_L1.47_scFv vlCDR2
GTNKRAP

SEQ ID NO: 542 - protein, 9 aa, synthetic construct
  source 1..9: note = CD3 High-Int #1 - [anti-CD3]_H1.32_L1.47_scFv vlCDR3
ALWYSNHWV

SEQ ID NO: 543 - protein, 20 aa, synthetic construct
  source 1..20: note = CD3 High-Int #1 - [anti-CD3]_H1.32_L1.47_scFv Linker
GKPGSGKPGSGKPGSGKPGS

SEQ ID NO: 544 - protein, 254 aa, synthetic construct
  source 1..254: note = CD3 High-Int #2 - [anti-CD3]_H1.89_L1.47_scFv scFv
EVQLVESGGGLVQPGGSLRLSCAASGFTFSTYAMNWVRQAPGKGLEWVGRIRSKYNNYATYYADSVKGRFTISRDDSKNTLYLQMNSLRAEDTAVYYCVRHGNFGDEYVSWFAYWGQGTLVTVSSGKPGSGKPGSGKPGSGKPGSQAVVTQEPSLTVSPGGTVTLTCGSSTGAVTTSNYANWVQQKPGKSPRGLIGGTNKRAPGVPARFSGSLLGGKAALTISGAQPEDEADYYCALWYSNHWVFGGGTKLTVL

SEQ ID NO: 545 - protein, 125 aa, synthetic construct
  source 1..125: note = CD3 High-Int #2 - [anti-CD3]_H1.89_L1.47_scFv Variable Heavy (vh) Domain
EVQLVESGGGLVQPGGSLRLSCAASGFTFSTYAMNWVRQAPGKGLEWVGRIRSKYNNYATYYADSVKGRFTISRDDSKNTLYLQMNSLRAEDTAVYYCVRHGNFGDEYVSWFAYWGQGTLVTVSS

SEQ ID NO: 546 - protein, 5 aa, synthetic construct
  source 1..5: note = CD3 High-Int #2 - [anti-CD3]_H1.89_L1.47_scFv vhCDR1
TYAMN

SEQ ID NO: 547 - protein, 19 aa, synthetic construct
  source 1..19: note = CD3 High-Int #2 - [anti-CD3]_H1.89_L1.47_scFv vhCDR2
RIRSKYNNYATYYADSVKG

SEQ ID NO: 548 - protein, 14 aa, synthetic construct
  source 1..14: note = CD3 High-Int #2 - [anti-CD3]_H1.89_L1.47_scFv vhCDR3
HGNFGDEYVSWFAY

SEQ ID NO: 549 - protein, 109 aa, synthetic construct; identical to SEQ ID NO: 529
  source 1..109: note = CD3 High-Int #2 - [anti-CD3]_H1.89_L1.47_scFv Variable Light (vl) Domain

SEQ ID NO: 550 - protein, 14 aa, synthetic construct
  source 1..14: note = CD3 High-Int #2 - [anti-CD3]_H1.89_L1.47_scFv vlCDR1
GSSTGAVTTSNYAN

SEQ ID NO: 551 - protein, 7 aa, synthetic construct
  source 1..7: note = CD3 High-Int #2 - [anti-CD3]_H1.89_L1.47_scFv vlCDR2
GTNKRAP

SEQ ID NO: 552 - protein, 9 aa, synthetic construct
  source 1..9: note = CD3 High-Int #2 - [anti-CD3]_H1.89_L1.47_scFv vlCDR3
ALWYSNHWV

SEQ ID NO: 553 - protein, 20 aa, synthetic construct
  source 1..20: note = CD3 High-Int #2 - [anti-CD3]_H1.89_L1.47_scFv Linker
GKPGSGKPGSGKPGSGKPGS

SEQ ID NO: 554 - protein, 254 aa, synthetic construct
  source 1..254: note = CD3 High-Int - [anti-CD3]_H1.90_L1.47_scFv scFv
EVQLVESGGGLVQPGGSLRLSCAASGFTFSTYAMNWVRQAPGKGLEWVGRIRSKYNNYATYYADSVKGRFTISRDDSKNTLYLQMNSLRAEDTAVYYCVRHGNFGDPYVSWFAYWGQGTLVTVSSGKPGSGKPGSGKPGSGKPGSQAVVTQEPSLTVSPGGTVTLTCGSSTGAVTTSNYANWVQQKPGKSPRGLIGGTNKRAPGVPARFSGSLLGGKAALTISGAQPEDEADYYCALWYSNHWVFGGGTKLTVL

SEQ ID NO: 555 - protein, 125 aa, synthetic construct
  source 1..125: note = CD3 High-Int - [anti-CD3]_H1.90_L1.47_scFv Variable Heavy (vh) Domain
EVQLVESGGGLVQPGGSLRLSCAASGFTFSTYAMNWVRQAPGKGLEWVGRIRSKYNNYATYYADSVKGRFTISRDDSKNTLYLQMNSLRAEDTAVYYCVRHGNFGDPYVSWFAYWGQGTLVTVSS

SEQ ID NO: 556 - protein, 5 aa, synthetic construct
  source 1..5: note = CD3 High-Int - [anti-CD3]_H1.90_L1.47_scFv vhCDR1
TYAMN

SEQ ID NO: 557 - protein, 19 aa, synthetic construct
  source 1..19: note = CD3 High-Int - [anti-CD3]_H1.90_L1.47_scFv vhCDR2
RIRSKYNNYATYYADSVKG

SEQ ID NO: 558 - protein, 14 aa, synthetic construct
  source 1..14: note = CD3 High-Int - [anti-CD3]_H1.90_L1.47_scFv vhCDR3
HGNFGDPYVSWFAY

SEQ ID NO: 559 - protein, 109 aa, synthetic construct; identical to SEQ ID NO: 529
  source 1..109: note = CD3 High-Int - [anti-CD3]_H1.90_L1.47_scFv Variable Light (vl) Domain

SEQ ID NO: 560 - protein, 14 aa, synthetic construct
  source 1..14: note = CD3 High-Int - [anti-CD3]_H1.90_L1.47_scFv vlCDR1
GSSTGAVTTSNYAN

SEQ ID NO: 561 - protein, 7 aa, synthetic construct
  source 1..7: note = CD3 High-Int - [anti-CD3]_H1.90_L1.47_scFv vlCDR2
GTNKRAP

SEQ ID NO: 562 - protein, 9 aa, synthetic construct
  source 1..9: note = CD3 High-Int - [anti-CD3]_H1.90_L1.47_scFv vlCDR3
ALWYSNHWV

SEQ ID NO: 563 - protein, 20 aa, synthetic construct
  source 1..20: note = CD3 High-Int - [anti-CD3]_H1.90_L1.47_scFv Linker
GKPGSGKPGSGKPGSGKPGS

SEQ ID NO: 564 - protein, 254 aa, synthetic construct
  source 1..254: note = Anti-CD3-Intermediate - [anti-CD3]_H1.33_L1.47_scFv scFv
EVQLVESGGGLVQPGGSLRLSCAASGFTFSTYAMNWVRQAPGKGLEWVGRIRSKYNNYATYYADSVKGRFTISRDDSKNTLYLQMNSLRAEDTAVYYCVRHGNFGDSYVSWFDYWGQGTLVTVSSGKPGSGKPGSGKPGSGKPGSQAVVTQEPSLTVSPGGTVTLTCGSSTGAVTTSNYANWVQQKPGKSPRGLIGGTNKRAPGVPARFSGSLLGGKAALTISGAQPEDEADYYCALWYSNHWVFGGGTKLTVL

SEQ ID NO: 565 - protein, 125 aa, synthetic construct
  source 1..125: note = Anti-CD3-Intermediate - [anti-CD3]_H1.33_L1.47_scFv Variable Heavy (vh) Domain
EVQLVESGGGLVQPGGSLRLSCAASGFTFSTYAMNWVRQAPGKGLEWVGRIRSKYNNYATYYADSVKGRFTISRDDSKNTLYLQMNSLRAEDTAVYYCVRHGNFGDSYVSWFDYWGQGTLVTVSS

SEQ ID NO: 566 - protein, 5 aa, synthetic construct
  source 1..5: note = Anti-CD3-Intermediate - [anti-CD3]_H1.33_L1.47_scFv vhCDR1
TYAMN

SEQ ID NO: 567 - protein, 19 aa, synthetic construct
  source 1..19: note = Anti-CD3-Intermediate - [anti-CD3]_H1.33_L1.47_scFv vhCDR2
RIRSKYNNYATYYADSVKG

SEQ ID NO: 568 - protein, 14 aa, synthetic construct
  source 1..14: note = Anti-CD3-Intermediate - [anti-CD3]_H1.33_L1.47_scFv vhCDR3
HGNFGDSYVSWFDY

SEQ ID NO: 569 - protein, 109 aa, synthetic construct; identical to SEQ ID NO: 529
  source 1..109: note = Anti-CD3-Intermediate - [anti-CD3]_H1.33_L1.47_scFv Variable Light (vl) Domain

SEQ ID NO: 570 - protein, 14 aa, synthetic construct
  source 1..14: note = Anti-CD3-Intermediate - [anti-CD3]_H1.33_L1.47_scFv vlCDR1
GSSTGAVTTSNYAN

SEQ ID NO: 571 - protein, 7 aa, synthetic construct
  source 1..7: note = Anti-CD3-Intermediate - [anti-CD3]_H1.33_L1.47_scFv vlCDR2
GTNKRAP

SEQ ID NO: 572 - protein, 9 aa, synthetic construct
  source 1..9: note = Anti-CD3-Intermediate - [anti-CD3]_H1.33_L1.47_scFv vlCDR3
ALWYSNHWV

SEQ ID NO: 573 - protein, 20 aa, synthetic construct
  source 1..20: note = Anti-CD3-Intermediate - [anti-CD3]_H1.33_L1.47_scFv Linker
GKPGSGKPGSGKPGSGKPGS

SEQ ID NO: 574 - protein, 254 aa, synthetic construct
  source 1..254: note = CD3 High-Int - [anti-CD3]_H1.31_L1.47_scFv scFv
EVQLVESGGGLVQPGGSLRLSCAASGFTFSTYAMSWVRQAPGKGLEWVGRIRSKYNNYATYYADSVKGRFTISRDDSKNTLYLQMNSLRAEDTAVYYCVRHGNFGDSYVSWFAYWGQGTLVTVSSGKPGSGKPGSGKPGSGKPGSQAVVTQEPSLTVSPGGTVTLTCGSSTGAVTTSNYANWVQQKPGKSPRGLIGGTNKRAPGVPARFSGSLLGGKAALTISGAQPEDEADYYCALWYSNHWVFGGGTKLTVL

SEQ ID NO: 575 - protein, 125 aa, synthetic construct
  source 1..125: note = CD3 High-Int - [anti-CD3]_H1.31_L1.47_scFv Variable Heavy (vh) Domain
EVQLVESGGGLVQPGGSLRLSCAASGFTFSTYAMSWVRQAPGKGLEWVGRIRSKYNNYATYYADSVKGRFTISRDDSKNTLYLQMNSLRAEDTAVYYCVRHGNFGDSYVSWFAYWGQGTLVTVSS

SEQ ID NO: 576 - protein, 5 aa, synthetic construct
  source 1..5: note = CD3 High-Int - [anti-CD3]_H1.31_L1.47_scFv vhCDR1
TYAMS

SEQ ID NO: 577 - protein, 19 aa, synthetic construct
  source 1..19: note = CD3 High-Int - [anti-CD3]_H1.31_L1.47_scFv vhCDR2
RIRSKYNNYATYYADSVKG

SEQ ID NO: 578 - protein, 14 aa, synthetic construct
  source 1..14: note = CD3 High-Int - [anti-CD3]_H1.31_L1.47_scFv vhCDR3
HGNFGDSYVSWFAY

SEQ ID NO: 579 - protein, 109 aa, synthetic construct; identical to SEQ ID NO: 529
  source 1..109: note = CD3 High-Int - [anti-CD3]_H1.31_L1.47_scFv Variable Light (vl) Domain

SEQ ID NO: 580 - protein, 14 aa, synthetic construct
  source 1..14: note = CD3 High-Int - [anti-CD3]_H1.31_L1.47_scFv vlCDR1
GSSTGAVTTSNYAN

SEQ ID NO: 581 - protein, 7 aa, synthetic construct
  source 1..7: note = CD3 High-Int - [anti-CD3]_H1.31_L1.47_scFv vlCDR2
GTNKRAP

SEQ ID NO: 582 - protein, 9 aa, synthetic construct
  source 1..9: note = CD3 High-Int - [anti-CD3]_H1.31_L1.47_scFv vlCDR3
ALWYSNHWV

SEQ ID NO: 583 - protein, 20 aa, synthetic construct
  source 1..20: note = CD3 High-Int - [anti-CD3]_H1.31_L1.47_scFv Linker
GKPGSGKPGSGKPGSGKPGS

SEQ ID NO: 584 - protein, 254 aa, synthetic construct
  source 1..254: note = CD3 High[VL-VH] - [anti-CD3]_L1.47_ H1.30_scFv scFv
QAVVTQEPSLTVSPGGTVTLTCGSSTGAVTTSNYANWVQQKPGKSPRGLIGGTNKRAPGVPARFSGSLLGGKAALTISGAQPEDEADYYCALWYSNHWVFGGGTKLTVLGKPGSGKPGSGKPGSGKPGSEVQLVESGGGLVQPGGSLRLSCAASGFTFSTYAMNWVRQAPGKGLEWVGRIRSKYNNYATYYADSVKGRFTISRDDSKNTLYLQMNSLRAEDTAVYYCVRHGNFGDSYVSWFAYWGQGTLVTVSS

SEQ ID NO: 585 - protein, 109 aa, synthetic construct; identical to SEQ ID NO: 529
  source 1..109: note = CD3 High[VL-VH] - [anti-CD3]_L1.47_ H1.30_scFv Variable Light (vl) Domain

SEQ ID NO: 586 - protein, 14 aa, synthetic construct
  source 1..14: note = CD3 High[VL-VH] - [anti-CD3]_L1.47_ H1.30_scFv vlCDR1
GSSTGAVTTSNYAN

SEQ ID NO: 587 - protein, 7 aa, synthetic construct
  source 1..7: note = CD3 High[VL-VH] - [anti-CD3]_L1.47_ H1.30_scFv vlCDR2
GTNKRAP

SEQ ID NO: 588 - protein, 9 aa, synthetic construct
  source 1..9: note = CD3 High[VL-VH] - [anti-CD3]_L1.47_ H1.30_scFv vlCDR3
ALWYSNHWV

SEQ ID NO: 589 - protein, 125 aa, synthetic construct; identical to SEQ ID NO: 525
  source 1..125: note = CD3 High[VL-VH] - [anti-CD3]_L1.47_ H1.30_scFv Variable Heavy (vh) Domain

SEQ ID NO: 590 - protein, 5 aa, synthetic construct
  source 1..5: note = CD3 High[VL-VH] - [anti-CD3]_L1.47_ H1.30_scFv vhCDR1
TYAMN

SEQ ID NO: 591 - protein, 19 aa, synthetic construct
  source 1..19: note = CD3 High[VL-VH] - [anti-CD3]_L1.47_ H1.30_scFv vhCDR2
RIRSKYNNYATYYADSVKG

SEQ ID NO: 592 - protein, 14 aa, synthetic construct
  source 1..14: note = CD3 High[VL-VH] - [anti-CD3]_L1.47_ H1.30_scFv vhCDR3
HGNFGDSYVSWFAY

SEQ ID NO: 593 - protein, 20 aa, synthetic construct
  source 1..20: note = CD3 High[VL-VH] - [anti-CD3]_L1.47_ H1.30_scFv Linker
GKPGSGKPGSGKPGSGKPGS

SEQ ID NO: 594 - protein, 254 aa, synthetic construct
  source 1..254: note = CD3 High-Int #1[VL-VH] - [anti-CD3]_L1.47_ H1.32_scFv scFv
QAVVTQEPSLTVSPGGTVTLTCGSSTGAVTTSNYANWVQQKPGKSPRGLIGGTNKRAPGVPARFSGSLLGGKAALTISGAQPEDEADYYCALWYSNHWVFGGGTKLTVLGKPGSGKPGSGKPGSGKPGSEVQLVESGGGLVQPGGSLRLSCAASGFTFSTYAMNWVRQAPGKGLEWVGRIRSKANNYATYYADSVKGRFTISRDDSKNTLYLQMNSLRAEDTAVYYCVRHGNFGDSYVSWFAYWGQGTLVTVSS

SEQ ID NO: 595 - protein, 109 aa, synthetic construct; identical to SEQ ID NO: 529
  source 1..109: note = CD3 High-Int #1[VL-VH] - [anti-CD3]_L1.47_ H1.32_scFv Variable Light (vl) Domain

SEQ ID NO: 596 - protein, 14 aa, synthetic construct
  source 1..14: note = CD3 High-Int #1[VL-VH] - [anti-CD3]_L1.47_ H1.32_scFv vlCDR1
GSSTGAVTTSNYAN

SEQ ID NO: 597 - protein, 7 aa, synthetic construct
  source 1..7: note = CD3 High-Int #1[VL-VH] - [anti-CD3]_L1.47_ H1.32_scFv vlCDR2
GTNKRAP

SEQ ID NO: 598 - protein, 9 aa, synthetic construct
  source 1..9: note = CD3 High-Int #1[VL-VH] - [anti-CD3]_L1.47_ H1.32_scFv vlCDR3
ALWYSNHWV

SEQ ID NO: 599 - protein, 125 aa, synthetic construct; identical to SEQ ID NO: 535
  source 1..125: note = CD3 High-Int #1[VL-VH] - [anti-CD3]_L1.47_ H1.32_scFv Variable Heavy (vh) Domain

SEQ ID NO: 600 - protein, 5 aa, synthetic construct
  source 1..5: note = CD3 High-Int #1[VL-VH] - [anti-CD3]_L1.47_ H1.32_scFv vhCDR1
TYAMN

SEQ ID NO: 601 - protein, 19 aa, synthetic construct
  source 1..19: note = CD3 High-Int #1[VL-VH] - [anti-CD3]_L1.47_ H1.32_scFv vhCDR2
RIRSKANNYATYYADSVKG

SEQ ID NO: 602 - protein, 14 aa, synthetic construct
  source 1..14: note = CD3 High-Int #1[VL-VH] - [anti-CD3]_L1.47_ H1.32_scFv vhCDR3
HGNFGDSYVSWFAY

SEQ ID NO: 603 - protein, 20 aa, synthetic construct
  source 1..20: note = CD3 High-Int #1[VL-VH] - [anti-CD3]_L1.47_ H1.32_scFv Linker
GKPGSGKPGSGKPGSGKPGS

SEQ ID NO: 604 - protein, 254 aa, synthetic construct
  source 1..254: note = CD3 High-Int #2[VL-VH] - [anti-CD3]_L1.47_ H1.89_scFv scFv
QAVVTQEPSLTVSPGGTVTLTCGSSTGAVTTSNYANWVQQKPGKSPRGLIGGTNKRAPGVPARFSGSLLGGKAALTISGAQPEDEADYYCALWYSNHWVFGGGTKLTVLGKPGSGKPGSGKPGSGKPGSEVQLVESGGGLVQPGGSLRLSCAASGFTFSTYAMNWVRQAPGKGLEWVGRIRSKYNNYATYYADSVKGRFTISRDDSKNTLYLQMNSLRAEDTAVYYCVRHGNFGDEYVSWFAYWGQGTLVTVSS

SEQ ID NO: 605 - protein, 109 aa, synthetic construct; identical to SEQ ID NO: 529
  source 1..109: note = CD3 High-Int #2[VL-VH] - [anti-CD3]_L1.47_ H1.89_scFv Variable Light (vl) Domain

SEQ ID NO: 606 - protein, 14 aa, synthetic construct
  source 1..14: note = CD3 High-Int #2[VL-VH] - [anti-CD3]_L1.47_ H1.89_scFv vlCDR1
GSSTGAVTTSNYAN

SEQ ID NO: 607 - protein, 7 aa, synthetic construct
  source 1..7: note = CD3 High-Int #2[VL-VH] - [anti-CD3]_L1.47_ H1.89_scFv vlCDR2
GTNKRAP

SEQ ID NO: 608 - protein, 9 aa, synthetic construct
  source 1..9: note = CD3 High-Int #2[VL-VH] - [anti-CD3]_L1.47_ H1.89_scFv vlCDR3
ALWYSNHWV

SEQ ID NO: 609 - protein, 125 aa, synthetic construct; identical to SEQ ID NO: 545
  source 1..125: note = CD3 High-Int #2[VL-VH] - [anti-CD3]_L1.47_ H1.89_scFv Variable Heavy (vh) Domain

SEQ ID NO: 610 - protein, 5 aa, synthetic construct
  source 1..5: note = CD3 High-Int #2[VL-VH] - [anti-CD3]_L1.47_ H1.89_scFv vhCDR1
TYAMN

SEQ ID NO: 611 - protein, 19 aa, synthetic construct
  source 1..19: note = CD3 High-Int #2[VL-VH] - [anti-CD3]_L1.47_ H1.89_scFv vhCDR2
RIRSKYNNYATYYADSVKG

SEQ ID NO: 612 - protein, 14 aa, synthetic construct
  source 1..14: note = CD3 High-Int #2[VL-VH] - [anti-CD3]_L1.47_ H1.89_scFv vhCDR3
HGNFGDEYVSWFAY

SEQ ID NO: 613 - protein, 20 aa, synthetic construct
  source 1..20: note = CD3 High-Int #2[VL-VH] - [anti-CD3]_L1.47_ H1.89_scFv Linker
GKPGSGKPGSGKPGSGKPGS

SEQ ID NO: 614 - protein, 254 aa, synthetic construct
  source 1..254: note = CD3 High-Int[VL-VH] - [anti-CD3]_L1.47_ H1.90_scFv scFv
QAVVTQEPSLTVSPGGTVTLTCGSSTGAVTTSNYANWVQQKPGKSPRGLIGGTNKRAPGVPARFSGSLLGGKAALTISGAQPEDEADYYCALWYSNHWVFGGGTKLTVLGKPGSGKPGSGKPGSGKPGSEVQLVESGGGLVQPGGSLRLSCAASGFTFSTYAMNWVRQAPGKGLEWVGRIRSKYNNYATYYADSVKGRFTISRDDSKNTLYLQMNSLRAEDTAVYYCVRHGNFGDPYVSWFAYWGQGTLVTVSS

SEQ ID NO: 615 - protein, 109 aa, synthetic construct; identical to SEQ ID NO: 529
  source 1..109: note = CD3 High-Int[VL-VH] - [anti-CD3]_L1.47_ H1.90_scFv Variable Light (vl) Domain

SEQ ID NO: 616 - protein, 14 aa, synthetic construct
  source 1..14: note = CD3 High-Int[VL-VH] - [anti-CD3]_L1.47_ H1.90_scFv vlCDR1
GSSTGAVTTSNYAN

SEQ ID NO: 617 - protein, 7 aa, synthetic construct
  source 1..7: note = CD3 High-Int[VL-VH] - [anti-CD3]_L1.47_ H1.90_scFv vlCDR2
GTNKRAP

SEQ ID NO: 618 - protein, 9 aa, synthetic construct
  source 1..9: note = CD3 High-Int[VL-VH] - [anti-CD3]_L1.47_ H1.90_scFv vlCDR3
ALWYSNHWV

SEQ ID NO: 619 - protein, 125 aa, synthetic construct; identical to SEQ ID NO: 555
  source 1..125: note = CD3 High-Int[VL-VH] - [anti-CD3]_L1.47_ H1.90_scFv Variable Heavy (vh) Domain

SEQ ID NO: 620 - protein, 5 aa, synthetic construct
  source 1..5: note = CD3 High-Int[VL-VH] - [anti-CD3]_L1.47_ H1.90_scFv vhCDR1
TYAMN

SEQ ID NO: 621 - protein, 19 aa, synthetic construct
  source 1..19: note = CD3 High-Int[VL-VH] - [anti-CD3]_L1.47_ H1.90_scFv vhCDR2
RIRSKYNNYATYYADSVKG

SEQ ID NO: 622 - protein, 14 aa, synthetic construct
  source 1..14: note = CD3 High-Int[VL-VH] - [anti-CD3]_L1.47_ H1.90_scFv vhCDR3
HGNFGDPYVSWFAY

SEQ ID NO: 623 - protein, 20 aa, synthetic construct
  source 1..20: note = CD3 High-Int[VL-VH] - [anti-CD3]_L1.47_ H1.90_scFv Linker
GKPGSGKPGSGKPGSGKPGS

SEQ ID NO: 624 - protein, 254 aa, synthetic construct
  source 1..254: note = Anti-CD3-Intermediate[VL-VH] - [anti-CD3]_L1.47_ H1.33_scFv scFv
QAVVTQEPSLTVSPGGTVTLTCGSSTGAVTTSNYANWVQQKPGKSPRGLIGGTNKRAPGVPARFSGSLLGGKAALTISGAQPEDEADYYCALWYSNHWVFGGGTKLTVLGKPGSGKPGSGKPGSGKPGSEVQLVESGGGLVQPGGSLRLSCAASGFTFSTYAMNWVRQAPGKGLEWVGRIRSKYNNYATYYADSVKGRFTISRDDSKNTLYLQMNSLRAEDTAVYYCVRHGNFGDSYVSWFDYWGQGTLVTVSS

SEQ ID NO: 625 - protein, 109 aa, synthetic construct; identical to SEQ ID NO: 529
  source 1..109: note = Anti-CD3-Intermediate[VL-VH] - [anti-CD3]_L1.47_ H1.33_scFv Variable Light (vl) Domain

SEQ ID NO: 626 - protein, 14 aa, synthetic construct
  source 1..14: note = Anti-CD3-Intermediate[VL-VH] - [anti-CD3]_L1.47_ H1.33_scFv vlCDR1
GSSTGAVTTSNYAN

SEQ ID NO: 627 - protein, 7 aa, synthetic construct
  source 1..7: note = Anti-CD3-Intermediate[VL-VH] - [anti-CD3]_L1.47_ H1.33_scFv vlCDR2
GTNKRAP

SEQ ID NO: 628 - protein, 9 aa, synthetic construct
  source 1..9: note = Anti-CD3-Intermediate[VL-VH] - [anti-CD3]_L1.47_ H1.33_scFv vlCDR3
ALWYSNHWV

SEQ ID NO: 629 - protein, 125 aa, synthetic construct; identical to SEQ ID NO: 565
  source 1..125: note = Anti-CD3-Intermediate[VL-VH] - [anti-CD3]_L1.47_ H1.33_scFv Variable Heavy (vh) Domain

SEQ ID NO: 630 - protein, 5 aa, synthetic construct
  source 1..5: note = Anti-CD3-Intermediate[VL-VH] - [anti-CD3]_L1.47_ H1.33_scFv vhCDR1
TYAMN

SEQ ID NO: 631 - protein, 19 aa, synthetic construct
  source 1..19: note = Anti-CD3-Intermediate[VL-VH] - [anti-CD3]_L1.47_ H1.33_scFv vhCDR2
RIRSKYNNYATYYADSVKG

SEQ ID NO: 632 - protein, 14 aa, synthetic construct
  source 1..14: note = Anti-CD3-Intermediate[VL-VH] - [anti-CD3]_L1.47_ H1.33_scFv vhCDR3
HGNFGDSYVSWFDY

SEQ ID NO: 633 - protein, 20 aa, synthetic construct
  source 1..20: note = Anti-CD3-Intermediate[VL-VH] - [anti-CD3]_L1.47_ H1.33_scFv Linker
GKPGSGKPGSGKPGSGKPGS

SEQ ID NO: 634 - protein, 254 aa, synthetic construct
  source 1..254: note = CD3 High-Int[VL-VH] - [anti-CD3]_L1.47_ H1.31_scFv scFv
QAVVTQEPSLTVSPGGTVTLTCGSSTGAVTTSNYANWVQQKPGKSPRGLIGGTNKRAPGVPARFSGSLLGGKAALTISGAQPEDEADYYCALWYSNHWVFGGGTKLTVLGKPGSGKPGSGKPGSGKPGSEVQLVESGGGLVQPGGSLRLSCAASGFTFSTYAMSWVRQAPGKGLEWVGRIRSKYNNYATYYADSVKGRFTISRDDSKNTLYLQMNSLRAEDTAVYYCVRHGNFGDSYVSWFAYWGQGTLVTVSS

SEQ ID NO: 635 - protein, 109 aa, synthetic construct; identical to SEQ ID NO: 529
  source 1..109: note = CD3 High-Int[VL-VH] - [anti-CD3]_L1.47_ H1.31_scFv Variable Light (vl) Domain

SEQ ID NO: 636 - protein, 14 aa, synthetic construct
  source 1..14: note = CD3 High-Int[VL-VH] - [anti-CD3]_L1.47_ H1.31_scFv vlCDR1
GSSTGAVTTSNYAN

SEQ ID NO: 637 - protein, 7 aa, synthetic construct
  source 1..7: note = CD3 High-Int[VL-VH] - [anti-CD3]_L1.47_ H1.31_scFv vlCDR2
GTNKRAP

SEQ ID NO: 638 - protein, 9 aa, synthetic construct
  source 1..9: note = CD3 High-Int[VL-VH] - [anti-CD3]_L1.47_ H1.31_scFv vlCDR3
ALWYSNHWV

SEQ ID NO: 639 - protein, 125 aa, synthetic construct; identical to SEQ ID NO: 575
  source 1..125: note = CD3 High-Int[VL-VH] - [anti-CD3]_L1.47_ H1.31_scFv Variable Heavy (vh) Domain

SEQ ID NO: 640 - protein, 5 aa, synthetic construct
  source 1..5: note = CD3 High-Int[VL-VH] - [anti-CD3]_L1.47_ H1.31_scFv vhCDR1
TYAMS

SEQ ID NO: 641 - protein, 19 aa, synthetic construct
  source 1..19: note = CD3 High-Int[VL-VH] - [anti-CD3]_L1.47_ H1.31_scFv vhCDR2
RIRSKYNNYATYYADSVKG

SEQ ID NO: 642 - protein, 14 aa, synthetic construct
  source 1..14: note = CD3 High-Int[VL-VH] - [anti-CD3]_L1.47_ H1.31_scFv vhCDR3
HGNFGDSYVSWFAY

SEQ ID NO: 643 - protein, 20 aa, synthetic construct
  source 1..20: note = CD3 High-Int[VL-VH] - [anti-CD3]_L1.47_ H1.31_scFv Linker
GKPGSGKPGSGKPGSGKPGS

SEQ ID NO: 644 - protein, 453 aa, synthetic construct; identical to SEQ ID NO: 482
  source 1..453: note = XENP44654 Chain 1- STEAP-A[STEAP1]_H1_Fab-IgG1_pI(-)_Isosteric_A_PVA_/S267K/L3 68D/K370S

SEQ ID NO: 645 - protein, 715 aa, synthetic construct
  source 1..715: note = XENP44654 Chain 2- STEAP-A[STEAP1]_H1_Fab-IgG1_PVA_/S267K/S364K/E357Q/K447del_ (G4S)3_1A7[CD28]_H1.14_L1.71_scFv(GKPGS)4
QVQVQESGPGLVKPSQTLSLTCTVSGYSITSDYAWNWIRQPPGKKLEWIGYISNSGSTSYNPSLKSRVTISRDTSKNQFSLKLSSVTAADTAVYYCARERNYDYDDYYYAMDYWGQGTLVTVSSASTKGPSVFPLAPSSKSTSGGTAALGCLVKDYFPEPVTVSWNSGALTSGVHTFPAVLQSSGLYSLSSVVTVPSSSLGTQTYICNVNHKPSNTKVDKKVEPKSCDKTHTCPPCPAPPVAGPSVFLFPPKPKDTLMISRTPEVTCVVVDVKHEDPEVKFNWYVDGVEVHNAKTKPREEQYNSTYRVVSVLTVLHQDWLNGKEYKCKVSNKALPAPIEKTISKAKGQPREPQVYTLPPSREQMTKNQVKLTCLVKGFYPSDIAVEWESNGQPENNYKTTPPVLDSDGSFFLYSKLTVDKSRWQQGNVFSCSVMHEALHNHYTQKSLSLSPGGGGGSGGGGSGGGGSEVQLLESGGGLVQPGGSLRLSCAASGFTFSSYYMSWVRQAPGKGLEWVSTISESGDSTYYADSVKGRFTISRDNSKNTLYLQMNSLRAEDTAVYYCAKSGPGLRQVGFDYWGQGTLVTVSSGKPGSGKPGSGKPGSGKPGSDIQMTQSPSSLSASVGDRVTITCRASQSISSYLNWYQQKPGKAPKLLIYAASSLQSGVPSRFSGSGSGTDFTLTISSLQPEDFATYYCQQVYSTPFTFGQGTKLEIK

SEQ ID NO: 646 - protein, 220 aa, synthetic construct; identical to SEQ ID NO: 484
  source 1..220: note = XENP44654 Chain 3-STEAP-A[STEAP1]_L1_Light Chain

SEQ ID NO: 647 - protein, 453 aa, synthetic construct; identical to SEQ ID NO: 482
  source 1..453: note = XENP44802 Chain 1- STEAP-A[STEAP1]_H1_Fab-IgG1_pI(-)_Isosteric_A_PVA_/S267K/L3 68D/K370S

SEQ ID NO: 648 - protein, 715 aa, synthetic construct
  source 1..715: note = XENP44802 Chain 2- STEAP-A[STEAP1]_H1_Fab-IgG1_PVA_/S267K/S364K/E357Q/K447del_ (G4S)3_1A7[CD28]_H1_L1.71_scFv(GKPGS)4
QVQVQESGPGLVKPSQTLSLTCTVSGYSITSDYAWNWIRQPPGKKLEWIGYISNSGSTSYNPSLKSRVTISRDTSKNQFSLKLSSVTAADTAVYYCARERNYDYDDYYYAMDYWGQGTLVTVSSASTKGPSVFPLAPSSKSTSGGTAALGCLVKDYFPEPVTVSWNSGALTSGVHTFPAVLQSSGLYSLSSVVTVPSSSLGTQTYICNVNHKPSNTKVDKKVEPKSCDKTHTCPPCPAPPVAGPSVFLFPPKPKDTLMISRTPEVTCVVVDVKHEDPEVKFNWYVDGVEVHNAKTKPREEQYNSTYRVVSVLTVLHQDWLNGKEYKCKVSNKALPAPIEKTISKAKGQPREPQVYTLPPSREQMTKNQVKLTCLVKGFYPSDIAVEWESNGQPENNYKTTPPVLDSDGSFFLYSKLTVDKSRWQQGNVFSCSVMHEALHNHYTQKSLSLSPGGGGGSGGGGSGGGGSEVQLLESGGGLVQPGGSLRLSCAASGFTFSSYAMSWVRQAPGKGLEWVSTISGSGDSTYYADSVKGRFTISRDNSKNTLYLQMNSLRAEDTAVYYCAKSGPGLRQVGFDYWGQGTLVTVSSGKPGSGKPGSGKPGSGKPGSDIQMTQSPSSLSASVGDRVTITCRASQSISSYLNWYQQKPGKAPKLLIYAASSLQSGVPSRFSGSGSGTDFTLTISSLQPEDFATYYCQQVYSTPFTFGQGTKLEIK

SEQ ID NO: 649 - protein, 220 aa, synthetic construct; identical to SEQ ID NO: 484
  source 1..220: note = XENP44802 Chain 3-STEAP-A[STEAP1]_L1_Light Chain

SEQ ID NO: 650 - protein, 453 aa, synthetic construct
  source 1..453: note = XENP45523 Chain 1- STEAP-A[STEAP1]_H1_Fab-IgG1_pI(-)_Isosteric_A_PVA_/S267K/L3 68D/K370S/M428L/N434S
QVQVQESGPGLVKPSQTLSLTCTVSGYSITSDYAWNWIRQPPGKKLEWIGYISNSGSTSYNPSLKSRVTISRDTSKNQFSLKLSSVTAADTAVYYCARERNYDYDDYYYAMDYWGQGTLVTVSSASTKGPSVFPLAPSSKSTSGGTAALGCLVKDYFPEPVTVSWNSGALTSGVHTFPAVLQSSGLYSLSSVVTVPSSSLGTQTYICNVNHKPSDTKVDKKVEPKSCDKTHTCPPCPAPPVAGPSVFLFPPKPKDTLMISRTPEVTCVVVDVKHEDPEVKFNWYVDGVEVHNAKTKPREEEYNSTYRVVSVLTVLHQDWLNGKEYKCKVSNKALPAPIEKTISKAKGQPREPQVYTLPPSREEMTKNQVSLTCDVSGFYPSDIAVEWESDGQPENNYKTTPPVLDSDGSFFLYSKLTVDKSRWEQGDVFSCSVLHEALHSHYTQKSLSLSPGK

SEQ ID NO: 651 - protein, 715 aa, synthetic construct
  source 1..715: note = XENP45523 Chain 2- STEAP-A[STEAP1]_H1_Fab-IgG1_PVA_/S267K/S364K/E357Q/M428L/N4 34S/K447del_(G4S)3_1A7[CD28]_H1.14_L1_scFv(GKPGS)4
QVQVQESGPGLVKPSQTLSLTCTVSGYSITSDYAWNWIRQPPGKKLEWIGYISNSGSTSYNPSLKSRVTISRDTSKNQFSLKLSSVTAADTAVYYCARERNYDYDDYYYAMDYWGQGTLVTVSSASTKGPSVFPLAPSSKSTSGGTAALGCLVKDYFPEPVTVSWNSGALTSGVHTFPAVLQSSGLYSLSSVVTVPSSSLGTQTYICNVNHKPSNTKVDKKVEPKSCDKTHTCPPCPAPPVAGPSVFLFPPKPKDTLMISRTPEVTCVVVDVKHEDPEVKFNWYVDGVEVHNAKTKPREEQYNSTYRVVSVLTVLHQDWLNGKEYKCKVSNKALPAPIEKTISKAKGQPREPQVYTLPPSREQMTKNQVKLTCLVKGFYPSDIAVEWESNGQPENNYKTTPPVLDSDGSFFLYSKLTVDKSRWQQGNVFSCSVLHEALHSHYTQKSLSLSPGGGGGSGGGGSGGGGSEVQLLESGGGLVQPGGSLRLSCAASGFTFSSYYMSWVRQAPGKGLEWVSTISESGDSTYYADSVKGRFTISRDNSKNTLYLQMNSLRAEDTAVYYCAKSGPGLRQVGFDYWGQGTLVTVSSGKPGSGKPGSGKPGSGKPGSDIQMTQSPSSLSASVGDRVTITCRASQSISSYLNWYQQKPGKAPKLLIYAASSLQSGVPSRFSGSGSGTDFTLTISSLQPEDFATYYCQQSYSTPFTFGQGTKLEIK

SEQ ID NO: 652 - protein, 220 aa, synthetic construct; identical to SEQ ID NO: 484
  source 1..220: note = XENP45523 Chain 3-STEAP-A[STEAP1]_L1_Light Chain

SEQ ID NO: 653 - protein, 453 aa, synthetic construct; identical to SEQ ID NO: 650
  source 1..453: note = XENP45524 Chain 1- STEAP-A[STEAP1]_H1_Fab-IgG1_pI(-)_Isosteric_A_PVA_/S267K/L3 68D/K370S/M428L/N434S

SEQ ID NO: 654 - protein, 715 aa, synthetic construct
  source 1..715: note = XENP45524 Chain 2- STEAP-A[STEAP1]_H1_Fab-IgG1_PVA_/S267K/S364K/E357Q/M428L/N4 34S/K447del_(G4S)3_1A7[CD28]_H1_L1.71_scFv(GKPGS)4
QVQVQESGPGLVKPSQTLSLTCTVSGYSITSDYAWNWIRQPPGKKLEWIGYISNSGSTSYNPSLKSRVTISRDTSKNQFSLKLSSVTAADTAVYYCARERNYDYDDYYYAMDYWGQGTLVTVSSASTKGPSVFPLAPSSKSTSGGTAALGCLVKDYFPEPVTVSWNSGALTSGVHTFPAVLQSSGLYSLSSVVTVPSSSLGTQTYICNVNHKPSNTKVDKKVEPKSCDKTHTCPPCPAPPVAGPSVFLFPPKPKDTLMISRTPEVTCVVVDVKHEDPEVKFNWYVDGVEVHNAKTKPREEQYNSTYRVVSVLTVLHQDWLNGKEYKCKVSNKALPAPIEKTISKAKGQPREPQVYTLPPSREQMTKNQVKLTCLVKGFYPSDIAVEWESNGQPENNYKTTPPVLDSDGSFFLYSKLTVDKSRWQQGNVFSCSVLHEALHSHYTQKSLSLSPGGGGGSGGGGSGGGGSEVQLLESGGGLVQPGGSLRLSCAASGFTFSSYAMSWVRQAPGKGLEWVSTISGSGDSTYYADSVKGRFTISRDNSKNTLYLQMNSLRAEDTAVYYCAKSGPGLRQVGFDYWGQGTLVTVSSGKPGSGKPGSGKPGSGKPGSDIQMTQSPSSLSASVGDRVTITCRASQSISSYLNWYQQKPGKAPKLLIYAASSLQSGVPSRFSGSGSGTDFTLTISSLQPEDFATYYCQQVYSTPFTFGQGTKLEIK

SEQ ID NO: 655 - protein, 220 aa, synthetic construct; identical to SEQ ID NO: 484
  source 1..220: note = XENP45524 Chain 3-STEAP-A[STEAP1]_L1_Light Chain

SEQ ID NO: 656 - protein, 453 aa, synthetic construct; identical to SEQ ID NO: 650
  source 1..453: note = XENP45525 Chain 1- STEAP-A[STEAP1]_H1_Fab-IgG1_pI(-)_Isosteric_A_PVA_/S267K/L3 68D/K370S/M428L/N434S

SEQ ID NO: 657 - protein, 715 aa, synthetic construct
  source 1..715: note = XENP45525 Chain 2- STEAP-A[STEAP1]_H1_Fab-IgG1_PVA_/S267K/S364K/E357Q/M428L/N4 34S/K447del_(G4S)3_1A7[CD28]_H1.1_L1.71_scFv(GKPGS)4
QVQVQESGPGLVKPSQTLSLTCTVSGYSITSDYAWNWIRQPPGKKLEWIGYISNSGSTSYNPSLKSRVTISRDTSKNQFSLKLSSVTAADTAVYYCARERNYDYDDYYYAMDYWGQGTLVTVSSASTKGPSVFPLAPSSKSTSGGTAALGCLVKDYFPEPVTVSWNSGALTSGVHTFPAVLQSSGLYSLSSVVTVPSSSLGTQTYICNVNHKPSNTKVDKKVEPKSCDKTHTCPPCPAPPVAGPSVFLFPPKPKDTLMISRTPEVTCVVVDVKHEDPEVKFNWYVDGVEVHNAKTKPREEQYNSTYRVVSVLTVLHQDWLNGKEYKCKVSNKALPAPIEKTISKAKGQPREPQVYTLPPSREQMTKNQVKLTCLVKGFYPSDIAVEWESNGQPENNYKTTPPVLDSDGSFFLYSKLTVDKSRWQQGNVFSCSVLHEALHSHYTQKSLSLSPGGGGGSGGGGSGGGGSEVQLLESGGGLVQPGGSLRLSCAASGFTFSSYYMSWVRQAPGKGLEWVSTISGSGDSTYYADSVKGRFTISRDNSKNTLYLQMNSLRAEDTAVYYCAKSGPGLRQVGFDYWGQGTLVTVSSGKPGSGKPGSGKPGSGKPGSDIQMTQSPSSLSASVGDRVTITCRASQSISSYLNWYQQKPGKAPKLLIYAASSLQSGVPSRFSGSGSGTDFTLTISSLQPEDFATYYCQQVYSTPFTFGQGTKLEIK

SEQ ID NO: 658 - protein, 220 aa, synthetic construct; identical to SEQ ID NO: 484
  source 1..220: note = XENP45525 Chain 3-STEAP-A[STEAP1]_L1_Light Chain

SEQ ID NO: 659 - protein, 453 aa, synthetic construct; identical to SEQ ID NO: 650
  source 1..453: note = XENP45526 Chain 1- STEAP-A[STEAP1]_H1_Fab-IgG1_pI(-)_Isosteric_A_PVA_/S267K/L3 68D/K370S/M428L/N434S

SEQ ID NO: 660 - protein, 715 aa, synthetic construct
  source 1..715: note = XENP45526 Chain 2- STEAP-A[STEAP1]_H1_Fab-IgG1_PVA_/S267K/S364K/E357Q/M428L/N4 34S/K447del_(G4S)3_1A7[CD28]_H1.14_L1.71_scFv(GKPGS)4
QVQVQESGPGLVKPSQTLSLTCTVSGYSITSDYAWNWIRQPPGKKLEWIGYISNSGSTSYNPSLKSRVTISRDTSKNQFSLKLSSVTAADTAVYYCARERNYDYDDYYYAMDYWGQGTLVTVSSASTKGPSVFPLAPSSKSTSGGTAALGCLVKDYFPEPVTVSWNSGALTSGVHTFPAVLQSSGLYSLSSVVTVPSSSLGTQTYICNVNHKPSNTKVDKKVEPKSCDKTHTCPPCPAPPVAGPSVFLFPPKPKDTLMISRTPEVTCVVVDVKHEDPEVKFNWYVDGVEVHNAKTKPREEQYNSTYRVVSVLTVLHQDWLNGKEYKCKVSNKALPAPIEKTISKAKGQPREPQVYTLPPSREQMTKNQVKLTCLVKGFYPSDIAVEWESNGQPENNYKTTPPVLDSDGSFFLYSKLTVDKSRWQQGNVFSCSVLHEALHSHYTQKSLSLSPGGGGGSGGGGSGGGGSEVQLLESGGGLVQPGGSLRLSCAASGFTFSSYYMSWVRQAPGKGLEWVSTISESGDSTYYADSVKGRFTISRDNSKNTLYLQMNSLRAEDTAVYYCAKSGPGLRQVGFDYWGQGTLVTVSSGKPGSGKPGSGKPGSGKPGSDIQMTQSPSSLSASVGDRVTITCRASQSISSYLNWYQQKPGKAPKLLIYAASSLQSGVPSRFSGSGSGTDFTLTISSLQPEDFATYYCQQVYSTPFTFGQGTKLEIK

SEQ ID NO: 661 - protein, 220 aa, synthetic construct; identical to SEQ ID NO: 484
  source 1..220: note = XENP45526 Chain 3-STEAP-A[STEAP1]_L1_Light Chain

SEQ ID NO: 662 - protein, 453 aa, synthetic construct; identical to SEQ ID NO: 479
  source 1..453: note = XENP45528 Chain 1- STEAP-A[STEAP1]_H0-IgG1_pI(-)_Isosteric_A_PVA_/S267K/L368D/ K370S

SEQ ID NO: 663 - protein, 715 aa, synthetic construct
  source 1..715: note = XENP45528 Chain 2- STEAP-A[STEAP1]_H0_Fab-IgG1_PVA_/S267K/S364K/E357Q/K447del_ (G4S)3_1A7[CD28]_H1.14_L1.71_scFv(GKPGS)4
DVQVQESGPGLVKPSQSLSLTCTVTGYSITSDYAWNWIRQFPGNKLEWMGYISNSGSTSYNPSLKSRISITRDTSKNQFFLQLISVTTEDTATYYCARERNYDYDDYYYAMDYWGQGTTLTVSAASTKGPSVFPLAPSSKSTSGGTAALGCLVKDYFPEPVTVSWNSGALTSGVHTFPAVLQSSGLYSLSSVVTVPSSSLGTQTYICNVNHKPSNTKVDKKVEPKSCDKTHTCPPCPAPPVAGPSVFLFPPKPKDTLMISRTPEVTCVVVDVKHEDPEVKFNWYVDGVEVHNAKTKPREEQYNSTYRVVSVLTVLHQDWLNGKEYKCKVSNKALPAPIEKTISKAKGQPREPQVYTLPPSREQMTKNQVKLTCLVKGFYPSDIAVEWESNGQPENNYKTTPPVLDSDGSFFLYSKLTVDKSRWQQGNVFSCSVMHEALHNHYTQKSLSLSPGGGGGSGGGGSGGGGSEVQLLESGGGLVQPGGSLRLSCAASGFTFSSYYMSWVRQAPGKGLEWVSTISESGDSTYYADSVKGRFTISRDNSKNTLYLQMNSLRAEDTAVYYCAKSGPGLRQVGFDYWGQGTLVTVSSGKPGSGKPGSGKPGSGKPGSDIQMTQSPSSLSASVGDRVTITCRASQSISSYLNWYQQKPGKAPKLLIYAASSLQSGVPSRFSGSGSGTDFTLTISSLQPEDFATYYCQQVYSTPFTFGQGTKLEIK

SEQ ID NO: 664 - protein, 220 aa, synthetic construct; identical to SEQ ID NO: 481
  source 1..220: note = XENP45528 Chain 3-STEAP-A[STEAP1]_L1_Light Chain

SEQ ID NO: 665 - protein, 453 aa, synthetic construct; identical to SEQ ID NO: 650
  source 1..453: note = XENP46795 Chain 1-  STEAP-A[STEAP1]_H1_IgG1_pI(-)_Iso steric_A_PVA_/S267K/L368D/K370S/M428L/N434S

SEQ ID NO: 666 - protein, 715 aa, synthetic construct; identical to SEQ ID NO: 660
  source 1..715: note = XENP46795 Chain 2-  STEAP-A[STEAP1]_H1_Fab-IgG1_PVA_/ S267K/S364K/E357Q/M428L/N434S/K447del_(G4S)3_1A7[CD28]_H1.1 4_L1.71_scFv(GKPGS)4

SEQ ID NO: 667 - protein, 220 aa, synthetic construct; identical to SEQ ID NO: 493
  source 1..220: note = XENP46795 Chain 3-  STEAP-A[STEAP1]_L1.115_Light Chain

SEQ ID NO: 668 - protein, 453 aa, synthetic construct; identical to SEQ ID NO: 500
  source 1..453: note = XENP46852 Chain 1-  STEAP-A[STEAP1]_H1.228_IgG1_pI(-) _Isosteric_A_PVA_/S267K/L368D/K370S/M428L/N434S

SEQ ID NO: 669 - protein, 715 aa, synthetic construct
  source 1..715: note = XENP46852 Chain 2-  STEAP-A[STEAP1]_H1.228_Fab-IgG1_P VA_/S267K/S364K/E357Q/M428L/N434S/K447del_(G4S)3_1A7[CD28]_ H1.129_L1_VH_G46C_VL_Q108C_scFv(GKPGS)4
QVQVQESGPGLVKPSQTLSLTCTVSGYSITSDYSWNWIRQPPGKKLEWIGYIGNSGSTVYNPSLKSRVTISRDTSKNQFSLKLSSVTAADTAVYYCARERNYDYELYYYAMDYWGQGTLVTVSSASTKGPSVFPLAPSSKSTSGGTAALGCLVKDYFPEPVTVSWNSGALTSGVHTFPAVLQSSGLYSLSSVVTVPSSSLGTQTYICNVNHKPSNTKVDKKVEPKSCDKTHTCPPCPAPPVAGPSVFLFPPKPKDTLMISRTPEVTCVVVDVKHEDPEVKFNWYVDGVEVHNAKTKPREEQYNSTYRVVSVLTVLHQDWLNGKEYKCKVSNKALPAPIEKTISKAKGQPREPQVYTLPPSREQMTKNQVKLTCLVKGFYPSDIAVEWESNGQPENNYKTTPPVLDSDGSFFLYSKLTVDKSRWQQGNVFSCSVLHEALHSHYTQKSLSLSPGGGGGSGGGGSGGGGSEVQLLESGGGLVQPGGSLRLSCAASGFTFSSYYMSWVRQAPGKCLEWVSTISERADSTYYADSVKGRFTISRDNSKNTLYLQMNSLRAEDTAVYYCAKSGPGLRQVGFDYWGQGTLVTVSSGKPGSGKPGSGKPGSGKPGSDIQMTQSPSSLSASVGDRVTITCRASQSISSYLNWYQQKPGKAPKLLIYAASSLQSGVPSRFSGSGSGTDFTLTISSLQPEDFATYYCQQSYSTPFTFGCGTKLEIK

SEQ ID NO: 670 - protein, 220 aa, synthetic construct; identical to SEQ ID NO: 493
  source 1..220: note = XENP46852 Chain 3-  STEAP-A[STEAP1]_L1.115_Light Chain

SEQ ID NO: 671 - protein, 453 aa, synthetic construct; identical to SEQ ID NO: 500
  source 1..453: note = XENP46981 Chain 1-  STEAP-A[STEAP1]_H1.228_IgG1_pI(-) _Isosteric_A_PVA_/S267K/L368D/K370S/M428L/N434S

SEQ ID NO: 672 - protein, 705 aa, synthetic construct
  source 1..705: note = XENP46981 Chain 2-  STEAP-A[STEAP1]_H1.228_Fab-IgG1_P VA_/S267K/S364K/E357Q/M428L/N434S/K447del_G4S_1A7[CD28]_H1. 129_L1_VH_G46C_VL_Q108C_scFv(GKPGS)4
QVQVQESGPGLVKPSQTLSLTCTVSGYSITSDYSWNWIRQPPGKKLEWIGYIGNSGSTVYNPSLKSRVTISRDTSKNQFSLKLSSVTAADTAVYYCARERNYDYELYYYAMDYWGQGTLVTVSSASTKGPSVFPLAPSSKSTSGGTAALGCLVKDYFPEPVTVSWNSGALTSGVHTFPAVLQSSGLYSLSSVVTVPSSSLGTQTYICNVNHKPSNTKVDKKVEPKSCDKTHTCPPCPAPPVAGPSVFLFPPKPKDTLMISRTPEVTCVVVDVKHEDPEVKFNWYVDGVEVHNAKTKPREEQYNSTYRVVSVLTVLHQDWLNGKEYKCKVSNKALPAPIEKTISKAKGQPREPQVYTLPPSREQMTKNQVKLTCLVKGFYPSDIAVEWESNGQPENNYKTTPPVLDSDGSFFLYSKLTVDKSRWQQGNVFSCSVLHEALHSHYTQKSLSLSPGGGGGSEVQLLESGGGLVQPGGSLRLSCAASGFTFSSYYMSWVRQAPGKCLEWVSTISERADSTYYADSVKGRFTISRDNSKNTLYLQMNSLRAEDTAVYYCAKSGPGLRQVGFDYWGQGTLVTVSSGKPGSGKPGSGKPGSGKPGSDIQMTQSPSSLSASVGDRVTITCRASQSISSYLNWYQQKPGKAPKLLIYAASSLQSGVPSRFSGSGSGTDFTLTISSLQPEDFATYYCQQSYSTPFTFGCGTKLEIK

SEQ ID NO: 673 - protein, 220 aa, synthetic construct; identical to SEQ ID NO: 493
  source 1..220: note = XENP46981 Chain 3-  STEAP-A[STEAP1]_L1.115_Light Chain

SEQ ID NO: 674 - protein, 453 aa, synthetic construct; identical to SEQ ID NO: 500
  source 1..453: note = XENP46982 Chain 1-  STEAP-A[STEAP1]_H1.228_IgG1_pI(-) _Isosteric_A_PVA_/S267K/L368D/K370S/M428L/N434S

SEQ ID NO: 675 - protein, 715 aa, synthetic construct
  source 1..715: note = XENP46982 Chain 2-  STEAP-A[STEAP1]_H1.228_Fab-IgG1_P VA_/S267K/S364K/E357Q/M428L/N434S/K447del_(G4A)3_1A7[CD28]_ H1.129_L1_VH_G46C_VL_Q108C_scFv(GKPGS)4
QVQVQESGPGLVKPSQTLSLTCTVSGYSITSDYSWNWIRQPPGKKLEWIGYIGNSGSTVYNPSLKSRVTISRDTSKNQFSLKLSSVTAADTAVYYCARERNYDYELYYYAMDYWGQGTLVTVSSASTKGPSVFPLAPSSKSTSGGTAALGCLVKDYFPEPVTVSWNSGALTSGVHTFPAVLQSSGLYSLSSVVTVPSSSLGTQTYICNVNHKPSNTKVDKKVEPKSCDKTHTCPPCPAPPVAGPSVFLFPPKPKDTLMISRTPEVTCVVVDVKHEDPEVKFNWYVDGVEVHNAKTKPREEQYNSTYRVVSVLTVLHQDWLNGKEYKCKVSNKALPAPIEKTISKAKGQPREPQVYTLPPSREQMTKNQVKLTCLVKGFYPSDIAVEWESNGQPENNYKTTPPVLDSDGSFFLYSKLTVDKSRWQQGNVFSCSVLHEALHSHYTQKSLSLSPGGGGGAGGGGAGGGGAEVQLLESGGGLVQPGGSLRLSCAASGFTFSSYYMSWVRQAPGKCLEWVSTISERADSTYYADSVKGRFTISRDNSKNTLYLQMNSLRAEDTAVYYCAKSGPGLRQVGFDYWGQGTLVTVSSGKPGSGKPGSGKPGSGKPGSDIQMTQSPSSLSASVGDRVTITCRASQSISSYLNWYQQKPGKAPKLLIYAASSLQSGVPSRFSGSGSGTDFTLTISSLQPEDFATYYCQQSYSTPFTFGCGTKLEIK

SEQ ID NO: 676 - protein, 220 aa, synthetic construct; identical to SEQ ID NO: 493
  source 1..220: note = XENP46982 Chain 3-  STEAP-A[STEAP1]_L1.115_Light Chain

SEQ ID NO: 677 - protein, 453 aa, synthetic construct; identical to SEQ ID NO: 500
  source 1..453: note = XENP46983 Chain 1-  STEAP-A[STEAP1]_H1.228_IgG1_pI(-) _Isosteric_A_PVA_/S267K/L368D/K370S/M428L/N434S

SEQ ID NO: 678 - protein, 710 aa, synthetic construct
  source 1..710: note = XENP46983 Chain 2-  STEAP-A[STEAP1]_H1.228_Fab-IgG1_P VA_/S267K/S364K/E357Q/M428L/N434S/K447del_(G4A)2_1A7[CD28]_ H1.129_L1_VH_G46C_VL_Q108C_scFv(GKPGS)4
QVQVQESGPGLVKPSQTLSLTCTVSGYSITSDYSWNWIRQPPGKKLEWIGYIGNSGSTVYNPSLKSRVTISRDTSKNQFSLKLSSVTAADTAVYYCARERNYDYELYYYAMDYWGQGTLVTVSSASTKGPSVFPLAPSSKSTSGGTAALGCLVKDYFPEPVTVSWNSGALTSGVHTFPAVLQSSGLYSLSSVVTVPSSSLGTQTYICNVNHKPSNTKVDKKVEPKSCDKTHTCPPCPAPPVAGPSVFLFPPKPKDTLMISRTPEVTCVVVDVKHEDPEVKFNWYVDGVEVHNAKTKPREEQYNSTYRVVSVLTVLHQDWLNGKEYKCKVSNKALPAPIEKTISKAKGQPREPQVYTLPPSREQMTKNQVKLTCLVKGFYPSDIAVEWESNGQPENNYKTTPPVLDSDGSFFLYSKLTVDKSRWQQGNVFSCSVLHEALHSHYTQKSLSLSPGGGGGAGGGGAEVQLLESGGGLVQPGGSLRLSCAASGFTFSSYYMSWVRQAPGKCLEWVSTISERADSTYYADSVKGRFTISRDNSKNTLYLQMNSLRAEDTAVYYCAKSGPGLRQVGFDYWGQGTLVTVSSGKPGSGKPGSGKPGSGKPGSDIQMTQSPSSLSASVGDRVTITCRASQSISSYLNWYQQKPGKAPKLLIYAASSLQSGVPSRFSGSGSGTDFTLTISSLQPEDFATYYCQQSYSTPFTFGCGTKLEIK

SEQ ID NO: 679 - protein, 220 aa, synthetic construct; identical to SEQ ID NO: 493
  source 1..220: note = XENP46983 Chain 3-  STEAP-A[STEAP1]_L1.115_Light Chain

SEQ ID NO: 680 - protein, 453 aa, synthetic construct; identical to SEQ ID NO: 500
  source 1..453: note = XENP46984 Chain 1-  STEAP-A[STEAP1]_H1.228_IgG1_pI(-) _Isosteric_A_PVA_/S267K/L368D/K370S/M428L/N434S

SEQ ID NO: 681 - protein, 705 aa, synthetic construct
  source 1..705: note = XENP46984 Chain 2-  STEAP-A[STEAP1]_H1.228_Fab-IgG1_P VA_/S267K/S364K/E357Q/M428L/N434S/K447del_G4A_1A7[CD28]_H1. 129_L1_VH_G46C_VL_Q108C_scFv(GKPGS)4
QVQVQESGPGLVKPSQTLSLTCTVSGYSITSDYSWNWIRQPPGKKLEWIGYIGNSGSTVYNPSLKSRVTISRDTSKNQFSLKLSSVTAADTAVYYCARERNYDYELYYYAMDYWGQGTLVTVSSASTKGPSVFPLAPSSKSTSGGTAALGCLVKDYFPEPVTVSWNSGALTSGVHTFPAVLQSSGLYSLSSVVTVPSSSLGTQTYICNVNHKPSNTKVDKKVEPKSCDKTHTCPPCPAPPVAGPSVFLFPPKPKDTLMISRTPEVTCVVVDVKHEDPEVKFNWYVDGVEVHNAKTKPREEQYNSTYRVVSVLTVLHQDWLNGKEYKCKVSNKALPAPIEKTISKAKGQPREPQVYTLPPSREQMTKNQVKLTCLVKGFYPSDIAVEWESNGQPENNYKTTPPVLDSDGSFFLYSKLTVDKSRWQQGNVFSCSVLHEALHSHYTQKSLSLSPGGGGGAEVQLLESGGGLVQPGGSLRLSCAASGFTFSSYYMSWVRQAPGKCLEWVSTISERADSTYYADSVKGRFTISRDNSKNTLYLQMNSLRAEDTAVYYCAKSGPGLRQVGFDYWGQGTLVTVSSGKPGSGKPGSGKPGSGKPGSDIQMTQSPSSLSASVGDRVTITCRASQSISSYLNWYQQKPGKAPKLLIYAASSLQSGVPSRFSGSGSGTDFTLTISSLQPEDFATYYCQQSYSTPFTFGCGTKLEIK

SEQ ID NO: 682 - protein, 220 aa, synthetic construct; identical to SEQ ID NO: 493
  source 1..220: note = XENP46984 Chain 3-  STEAP-A[STEAP1]_L1.115_Light Chain

SEQ ID NO: 683 - protein, 453 aa, synthetic construct; identical to SEQ ID NO: 503
  source 1..453: note = XENP47242 Chain 1-  STEAP-A[STEAP1]_H1.230_IgG1_pI(-) _Isosteric_A_PVA_/S267K/L368D/K370S/M428L/N434S

SEQ ID NO: 684 - protein, 715 aa, synthetic construct
  source 1..715: note = XENP47242 Chain 2-  STEAP-A[STEAP1]_H1.230_Fab_IgG1_P VA_/S267K/S364K/E357Q/M428L/N434S/K447del_(G4S)3_1A7[CD28]_ H1.129_L1.71_VH_G46C_VL_Q108C_scFv(GKPGS)4
QVQVQESGPGLVKPSQTLSLTCTVSGYSITSDYSWNWIRQPPGKKLEWIGYIGTSGSTVYNPSLKSRVTISRDTSKNQFSLKLSSVTAADTAVYYCARERNYDYELYYYAMDYWGQGTLVTVSSASTKGPSVFPLAPSSKSTSGGTAALGCLVKDYFPEPVTVSWNSGALTSGVHTFPAVLQSSGLYSLSSVVTVPSSSLGTQTYICNVNHKPSNTKVDKKVEPKSCDKTHTCPPCPAPPVAGPSVFLFPPKPKDTLMISRTPEVTCVVVDVKHEDPEVKFNWYVDGVEVHNAKTKPREEQYNSTYRVVSVLTVLHQDWLNGKEYKCKVSNKALPAPIEKTISKAKGQPREPQVYTLPPSREQMTKNQVKLTCLVKGFYPSDIAVEWESNGQPENNYKTTPPVLDSDGSFFLYSKLTVDKSRWQQGNVFSCSVLHEALHSHYTQKSLSLSPGGGGGSGGGGSGGGGSEVQLLESGGGLVQPGGSLRLSCAASGFTFSSYYMSWVRQAPGKCLEWVSTISERADSTYYADSVKGRFTISRDNSKNTLYLQMNSLRAEDTAVYYCAKSGPGLRQVGFDYWGQGTLVTVSSGKPGSGKPGSGKPGSGKPGSDIQMTQSPSSLSASVGDRVTITCRASQSISSYLNWYQQKPGKAPKLLIYAASSLQSGVPSRFSGSGSGTDFTLTISSLQPEDFATYYCQQVYSTPFTFGCGTKLEIK

SEQ ID NO: 685 - protein, 220 aa, synthetic construct; identical to SEQ ID NO: 514
  source 1..220: note = XENP47242 Chain 3-  STEAP-A[STEAP1]_L1.100_Light Chain

SEQ ID NO: 686 - protein, 453 aa, synthetic construct; identical to SEQ ID NO: 503
  source 1..453: note = XENP47239 Chain 1-  STEAP-A[STEAP1]_H1.230_IgG1_pI(-) _Isosteric_A_PVA_/S267K/L368D/K370S/M428L/N434S

SEQ ID NO: 687 - protein, 715 aa, synthetic construct
  source 1..715: note = XENP47239 Chain 2-  STEAP-A[STEAP1]_H1.230_Fab-IgG1_P VA_/S267K/S364K/E357Q/M428L/N434S/K447del_(G4S)3_1A7[CD28]_ H1.129_L1_VH_G46C_VL_Q108C_scFv(GKPGS)4
QVQVQESGPGLVKPSQTLSLTCTVSGYSITSDYSWNWIRQPPGKKLEWIGYIGTSGSTVYNPSLKSRVTISRDTSKNQFSLKLSSVTAADTAVYYCARERNYDYELYYYAMDYWGQGTLVTVSSASTKGPSVFPLAPSSKSTSGGTAALGCLVKDYFPEPVTVSWNSGALTSGVHTFPAVLQSSGLYSLSSVVTVPSSSLGTQTYICNVNHKPSNTKVDKKVEPKSCDKTHTCPPCPAPPVAGPSVFLFPPKPKDTLMISRTPEVTCVVVDVKHEDPEVKFNWYVDGVEVHNAKTKPREEQYNSTYRVVSVLTVLHQDWLNGKEYKCKVSNKALPAPIEKTISKAKGQPREPQVYTLPPSREQMTKNQVKLTCLVKGFYPSDIAVEWESNGQPENNYKTTPPVLDSDGSFFLYSKLTVDKSRWQQGNVFSCSVLHEALHSHYTQKSLSLSPGGGGGSGGGGSGGGGSEVQLLESGGGLVQPGGSLRLSCAASGFTFSSYYMSWVRQAPGKCLEWVSTISERADSTYYADSVKGRFTISRDNSKNTLYLQMNSLRAEDTAVYYCAKSGPGLRQVGFDYWGQGTLVTVSSGKPGSGKPGSGKPGSGKPGSDIQMTQSPSSLSASVGDRVTITCRASQSISSYLNWYQQKPGKAPKLLIYAASSLQSGVPSRFSGSGSGTDFTLTISSLQPEDFATYYCQQSYSTPFTFGCGTKLEIK

SEQ ID NO: 688 - protein, 220 aa, synthetic construct; identical to SEQ ID NO: 493
  source 1..220: note = XENP47239 Chain 3-  STEAP-A[STEAP1]_L1.115_Light Chain

SEQ ID NO: 689 - protein, 453 aa, synthetic construct; identical to SEQ ID NO: 503
  source 1..453: note = XENP47240 Chain 1-  STEAP-A[STEAP1]_H1.230_IgG1_pI(-) _Isosteric_A_PVA_/S267K/L368D/K370S/M428L/N434S

SEQ ID NO: 690 - protein, 715 aa, synthetic construct; identical to SEQ ID NO: 684
  source 1..715: note = XENP47240 Chain 2-  STEAP-A[STEAP1]_H1.230_Fab-IgG1_P VA_/S267K/S364K/E357Q/M428L/N434S/K447del_(G4S)3_1A7[CD28]_ H1.129_L1.71_VH_G46C_VL_Q108C_scFv(GKPGS)4

SEQ ID NO: 691 - protein, 220 aa, synthetic construct; identical to SEQ ID NO: 493
  source 1..220: note = XENP47240 Chain 3-  STEAP-A[STEAP1]_L1.115_Light Chain

SEQ ID NO: 692 - protein, 453 aa, synthetic construct; identical to SEQ ID NO: 503
  source 1..453: note = XENP47241 Chain 1-  STEAP-A[STEAP1]_H1.230_IgG1_pI(-) _Isosteric_A_PVA_/S267K/L368D/K370S/M428L/N434S

SEQ ID NO: 693 - protein, 715 aa, synthetic construct; identical to SEQ ID NO: 687
  source 1..715: note = XENP47241 Chain 2-  STEAP-A[STEAP1]_H1.230_Fab-IgG1_P VA_/S267K/S364K/E357Q/M428L/N434S/K447del_(G4S)3_1A7[CD28]_ H1.129_L1_VH_G46C_VL_Q108C_scFv(GKPGS)4

SEQ ID NO: 694 - protein, 220 aa, synthetic construct; identical to SEQ ID NO: 514
  source 1..220: note = XENP47241 Chain 3-  STEAP-A[STEAP1]_L1.100_Light Chain

SEQ ID NO: 695 - protein, 453 aa, synthetic construct; identical to SEQ ID NO: 503
  source 1..453: note = XENP47414 Chain 1-  STEAP-A[STEAP1]_H1.230_IgG1_pI(-) _Isosteric_A_PVA_/S267K/L368D/K370S/M428L/N434S

SEQ ID NO: 696 - protein, 705 aa, synthetic construct
  source 1..705: note = XENP47414 Chain 2-  STEAP-A[STEAP1]_H1.230_Fab-IgG1_P VA_/S267K/S364K/E357Q/M428L/N434S/K447del_G4A_1A7[CD28]_H1. 14_L1.71_VH_G46C_VL_Q108C_scFv(GKPGS)4
QVQVQESGPGLVKPSQTLSLTCTVSGYSITSDYSWNWIRQPPGKKLEWIGYIGTSGSTVYNPSLKSRVTISRDTSKNQFSLKLSSVTAADTAVYYCARERNYDYELYYYAMDYWGQGTLVTVSSASTKGPSVFPLAPSSKSTSGGTAALGCLVKDYFPEPVTVSWNSGALTSGVHTFPAVLQSSGLYSLSSVVTVPSSSLGTQTYICNVNHKPSNTKVDKKVEPKSCDKTHTCPPCPAPPVAGPSVFLFPPKPKDTLMISRTPEVTCVVVDVKHEDPEVKFNWYVDGVEVHNAKTKPREEQYNSTYRVVSVLTVLHQDWLNGKEYKCKVSNKALPAPIEKTISKAKGQPREPQVYTLPPSREQMTKNQVKLTCLVKGFYPSDIAVEWESNGQPENNYKTTPPVLDSDGSFFLYSKLTVDKSRWQQGNVFSCSVLHEALHSHYTQKSLSLSPGGGGGAEVQLLESGGGLVQPGGSLRLSCAASGFTFSSYYMSWVRQAPGKCLEWVSTISESGDSTYYADSVKGRFTISRDNSKNTLYLQMNSLRAEDTAVYYCAKSGPGLRQVGFDYWGQGTLVTVSSGKPGSGKPGSGKPGSGKPGSDIQMTQSPSSLSASVGDRVTITCRASQSISSYLNWYQQKPGKAPKLLIYAASSLQSGVPSRFSGSGSGTDFTLTISSLQPEDFATYYCQQVYSTPFTFGCGTKLEIK

SEQ ID NO: 697 - protein, 220 aa, synthetic construct; identical to SEQ ID NO: 493
  source 1..220: note = XENP47414 Chain 3-  STEAP-A[STEAP1]_L1.115_Light Chain

SEQ ID NO: 698 - protein, 453 aa, synthetic construct; identical to SEQ ID NO: 503
  source 1..453: note = XENP47415 Chain 1-  STEAP-A[STEAP1]_H1.230_IgG1_pI(-) _Isosteric_A_PVA_/S267K/L368D/K370S/M428L/N434S

SEQ ID NO: 699 - protein, 705 aa, synthetic construct
  source 1..705: note = XENP47415 Chain 2-  STEAP-A[STEAP1]_H1.230_Fab-IgG1_P VA_/S267K/S364K/E357Q/M428L/N434S/K447del_G4A_1A7[CD28]_H1. 129_L1_VH_G46C_VL_Q108C_scFv(GKPGS)4
QVQVQESGPGLVKPSQTLSLTCTVSGYSITSDYSWNWIRQPPGKKLEWIGYIGTSGSTVYNPSLKSRVTISRDTSKNQFSLKLSSVTAADTAVYYCARERNYDYELYYYAMDYWGQGTLVTVSSASTKGPSVFPLAPSSKSTSGGTAALGCLVKDYFPEPVTVSWNSGALTSGVHTFPAVLQSSGLYSLSSVVTVPSSSLGTQTYICNVNHKPSNTKVDKKVEPKSCDKTHTCPPCPAPPVAGPSVFLFPPKPKDTLMISRTPEVTCVVVDVKHEDPEVKFNWYVDGVEVHNAKTKPREEQYNSTYRVVSVLTVLHQDWLNGKEYKCKVSNKALPAPIEKTISKAKGQPREPQVYTLPPSREQMTKNQVKLTCLVKGFYPSDIAVEWESNGQPENNYKTTPPVLDSDGSFFLYSKLTVDKSRWQQGNVFSCSVLHEALHSHYTQKSLSLSPGGGGGAEVQLLESGGGLVQPGGSLRLSCAASGFTFSSYYMSWVRQAPGKCLEWVSTISERADSTYYADSVKGRFTISRDNSKNTLYLQMNSLRAEDTAVYYCAKSGPGLRQVGFDYWGQGTLVTVSSGKPGSGKPGSGKPGSGKPGSDIQMTQSPSSLSASVGDRVTITCRASQSISSYLNWYQQKPGKAPKLLIYAASSLQSGVPSRFSGSGSGTDFTLTISSLQPEDFATYYCQQSYSTPFTFGCGTKLEIK

SEQ ID NO: 700 - protein, 220 aa, synthetic construct; identical to SEQ ID NO: 493
  source 1..220: note = XENP47415 Chain 3-  STEAP-A[STEAP1]_L1.115_Light Chain

SEQ ID NO: 701 - protein, 453 aa, synthetic construct; identical to SEQ ID NO: 503
  source 1..453: note = XENP47416 Chain 1-  STEAP-A[STEAP1]_H1.230_IgG1_pI(-) _Isosteric_A_PVA_/S267K/L368D/K370S/M428L/N434S

SEQ ID NO: 702 - protein, 705 aa, synthetic construct
  source 1..705: note = XENP47416 Chain 2-  STEAP-A[STEAP1]_H1.230_Fab-IgG1_P VA_/S267K/S364K/E357Q/M428L/N434S/K447del_G4A_1A7[CD28]_H1. 129_L1.71_VH_G46C_VL_Q108C_scFv(GKPGS)4
QVQVQESGPGLVKPSQTLSLTCTVSGYSITSDYSWNWIRQPPGKKLEWIGYIGTSGSTVYNPSLKSRVTISRDTSKNQFSLKLSSVTAADTAVYYCARERNYDYELYYYAMDYWGQGTLVTVSSASTKGPSVFPLAPSSKSTSGGTAALGCLVKDYFPEPVTVSWNSGALTSGVHTFPAVLQSSGLYSLSSVVTVPSSSLGTQTYICNVNHKPSNTKVDKKVEPKSCDKTHTCPPCPAPPVAGPSVFLFPPKPKDTLMISRTPEVTCVVVDVKHEDPEVKFNWYVDGVEVHNAKTKPREEQYNSTYRVVSVLTVLHQDWLNGKEYKCKVSNKALPAPIEKTISKAKGQPREPQVYTLPPSREQMTKNQVKLTCLVKGFYPSDIAVEWESNGQPENNYKTTPPVLDSDGSFFLYSKLTVDKSRWQQGNVFSCSVLHEALHSHYTQKSLSLSPGGGGGAEVQLLESGGGLVQPGGSLRLSCAASGFTFSSYYMSWVRQAPGKCLEWVSTISERADSTYYADSVKGRFTISRDNSKNTLYLQMNSLRAEDTAVYYCAKSGPGLRQVGFDYWGQGTLVTVSSGKPGSGKPGSGKPGSGKPGSDIQMTQSPSSLSASVGDRVTITCRASQSISSYLNWYQQKPGKAPKLLIYAASSLQSGVPSRFSGSGSGTDFTLTISSLQPEDFATYYCQQVYSTPFTFGCGTKLEIK

SEQ ID NO: 703 - protein, 220 aa, synthetic construct; identical to SEQ ID NO: 493
  source 1..220: note = XENP47416 Chain 3-  STEAP-A[STEAP1]_L1.115_Light Chain

SEQ ID NO: 704 - protein, 453 aa, synthetic construct; identical to SEQ ID NO: 503
  source 1..453: note = XENP47417 Chain 1-  STEAP-A[STEAP1]_H1.230_IgG1_pI(-) _Isosteric_A_PVA_/S267K/L368D/K370S/M428L/N434S

SEQ ID NO: 705 - protein, 705 aa, synthetic construct; identical to SEQ ID NO: 696
  source 1..705: note = XENP47417 Chain 2-  STEAP-A[STEAP1]_H1.230_Fab-IgG1_P VA_/S267K/S364K/E357Q/M428L/N434S/K447del_G4A_1A7[CD28]_H1. 14_L1.71_VH_G46C_VL_Q108C_scFv(GKPGS)4

SEQ ID NO: 706 - protein, 220 aa, synthetic construct; identical to SEQ ID NO: 514
  source 1..220: note = XENP47417 Chain 3-  STEAP-A[STEAP1]_L1.100_Light Chain

SEQ ID NO: 707 - protein, 453 aa, synthetic construct; identical to SEQ ID NO: 503
  source 1..453: note = XENP47418 Chain 1-  STEAP-A[STEAP1]_H1.230_IgG1_pI(-) _Isosteric_A_PVA_/S267K/L368D/K370S/M428L/N434S

SEQ ID NO: 708 - protein, 705 aa, synthetic construct; identical to SEQ ID NO: 699
  source 1..705: note = XENP47418 Chain 2-  STEAP-A[STEAP1]_H1.230_Fab-IgG1_P VA_/S267K/S364K/E357Q/M428L/N434S/K447del_G4A_1A7[CD28]_H1. 129_L1_VH_G46C_VL_Q108C_scFv(GKPGS)4

SEQ ID NO: 709 - protein, 220 aa, synthetic construct; identical to SEQ ID NO: 514
  source 1..220: note = XENP47418 Chain 3-  STEAP-A[STEAP1]_L1.100_Light Chain

SEQ ID NO: 710 - protein, 453 aa, synthetic construct; identical to SEQ ID NO: 503
  source 1..453: note = XENP47419 Chain 1-  STEAP-A[STEAP1]_H1.230_IgG1_pI(-) _Isosteric_A_PVA_/S267K/L368D/K370S/M428L/N434S

SEQ ID NO: 711 - protein, 705 aa, synthetic construct; identical to SEQ ID NO: 702
  source 1..705: note = XENP47419 Chain 2-  STEAP-A[STEAP1]_H1.230_Fab-IgG1_P VA_/S267K/S364K/E357Q/M428L/N434S/K447del_G4A_1A7[CD28]_H1. 129_L1.71_VH_G46C_VL_Q108C_scFv(GKPGS)4

SEQ ID NO: 712 - protein, 220 aa, synthetic construct; identical to SEQ ID NO: 514
  source 1..220: note = XENP47419 Chain 3-  STEAP-A[STEAP1]_L1.100_Light Chain

SEQ ID NO: 713 - protein, 690 aa, synthetic construct
  source 1..690: note = XENP44658 Chain 1- STEAP-A[STEAP1]_H1_Fab_(G4A)2_STEAP-A[STEAP1]_H1_Fab-IgG1_p I(-)_Isosteric_A_PVA_/S267K/L368D/K370S/M428L/N434S
QVQVQESGPGLVKPSQTLSLTCTVSGYSITSDYAWNWIRQPPGKKLEWIGYISNSGSTSYNPSLKSRVTISRDTSKNQFSLKLSSVTAADTAVYYCARERNYDYDDYYYAMDYWGQGTLVTVSSASTKGPSVFPLAPSSKSTSGGTAALGCLVKDYFPEPVTVSWNSGALTSGVHTFPAVLQSSGLYSLSSVVTVPSSSLGTQTYICNVNHKPSDTKVDKKVEPKSCGGGGAGGGGAQVQVQESGPGLVKPSQTLSLTCTVSGYSITSDYAWNWIRQPPGKKLEWIGYISNSGSTSYNPSLKSRVTISRDTSKNQFSLKLSSVTAADTAVYYCARERNYDYDDYYYAMDYWGQGTLVTVSSASTKGPSVFPLAPSSKSTSGGTAALGCLVKDYFPEPVTVSWNSGALTSGVHTFPAVLQSSGLYSLSSVVTVPSSSLGTQTYICNVNHKPSDTKVDKKVEPKSCDKTHTCPPCPAPPVAGPSVFLFPPKPKDTLMISRTPEVTCVVVDVKHEDPEVKFNWYVDGVEVHNAKTKPREEEYNSTYRVVSVLTVLHQDWLNGKEYKCKVSNKALPAPIEKTISKAKGQPREPQVYTLPPSREEMTKNQVSLTCDVSGFYPSDIAVEWESDGQPENNYKTTPPVLDSDGSFFLYSKLTVDKSRWEQGDVFSCSVLHEALHSHYTQKSLSLSPGK

SEQ ID NO: 714 - protein, 479 aa, synthetic construct
  source 1..479: note = XENP44658 Chain 2- 1A7[CD28]_H1.14_L1.71_scFv(GKPGS)4-Fc(216)_IgG1_C220S/PVA_/ S267K/S364K/E357Q/M428L/N434S
EVQLLESGGGLVQPGGSLRLSCAASGFTFSSYYMSWVRQAPGKGLEWVSTISESGDSTYYADSVKGRFTISRDNSKNTLYLQMNSLRAEDTAVYYCAKSGPGLRQVGFDYWGQGTLVTVSSGKPGSGKPGSGKPGSGKPGSDIQMTQSPSSLSASVGDRVTITCRASQSISSYLNWYQQKPGKAPKLLIYAASSLQSGVPSRFSGSGSGTDFTLTISSLQPEDFATYYCQQVYSTPFTFGQGTKLEIKEPKSSDKTHTCPPCPAPPVAGPSVFLFPPKPKDTLMISRTPEVTCVVVDVKHEDPEVKFNWYVDGVEVHNAKTKPREEQYNSTYRVVSVLTVLHQDWLNGKEYKCKVSNKALPAPIEKTISKAKGQPREPQVYTLPPSREQMTKNQVKLTCLVKGFYPSDIAVEWESNGQPENNYKTTPPVLDSDGSFFLYSKLTVDKSRWQQGNVFSCSVLHEALHSHYTQKSLSLSPGK

SEQ ID NO: 715 - protein, 220 aa, synthetic construct; identical to SEQ ID NO: 484
  source 1..220: note = XENP44658 Chain 3-STEAP-A[STEAP1]_L1_Light Chain

SEQ ID NO: 716 - protein, 453 aa, synthetic construct
  source 1..453: note = XENP44680 Chain 1- STEAP-A[STEAP1]_H1_IgG1_PVA_/S267K
QVQVQESGPGLVKPSQTLSLTCTVSGYSITSDYAWNWIRQPPGKKLEWIGYISNSGSTSYNPSLKSRVTISRDTSKNQFSLKLSSVTAADTAVYYCARERNYDYDDYYYAMDYWGQGTLVTVSSASTKGPSVFPLAPSSKSTSGGTAALGCLVKDYFPEPVTVSWNSGALTSGVHTFPAVLQSSGLYSLSSVVTVPSSSLGTQTYICNVNHKPSNTKVDKKVEPKSCDKTHTCPPCPAPPVAGPSVFLFPPKPKDTLMISRTPEVTCVVVDVKHEDPEVKFNWYVDGVEVHNAKTKPREEQYNSTYRVVSVLTVLHQDWLNGKEYKCKVSNKALPAPIEKTISKAKGQPREPQVYTLPPSREEMTKNQVSLTCLVKGFYPSDIAVEWESNGQPENNYKTTPPVLDSDGSFFLYSKLTVDKSRWQQGNVFSCSVMHEALHNHYTQKSLSLSPGK

SEQ ID NO: 717 - protein, 220 aa, synthetic construct; identical to SEQ ID NO: 484
  source 1..220: note = XENP44680 Chain 2- STEAP-A[STEAP1]_L1_Light Chain

SEQ ID NO: 718 - protein, 453 aa, synthetic construct
  source 1..453: note = XENP44804 Chain 1- STEAP-A[STEAP1]_H1.1_IgG1_PVA_/S267K
QVQLQESGPGLVKPSQTLSLTCTVSGYSITSDYAWNWIRQPPGKKLEWIGYISNSGSTSYNPSLKSRVTISRDTSKNQFSLKLSSVTAADTAVYYCARERNYDYDDYYYAMDYWGQGTLVTVSSASTKGPSVFPLAPSSKSTSGGTAALGCLVKDYFPEPVTVSWNSGALTSGVHTFPAVLQSSGLYSLSSVVTVPSSSLGTQTYICNVNHKPSNTKVDKKVEPKSCDKTHTCPPCPAPPVAGPSVFLFPPKPKDTLMISRTPEVTCVVVDVKHEDPEVKFNWYVDGVEVHNAKTKPREEQYNSTYRVVSVLTVLHQDWLNGKEYKCKVSNKALPAPIEKTISKAKGQPREPQVYTLPPSREEMTKNQVSLTCLVKGFYPSDIAVEWESNGQPENNYKTTPPVLDSDGSFFLYSKLTVDKSRWQQGNVFSCSVMHEALHNHYTQKSLSLSPGK

SEQ ID NO: 719 - protein, 220 aa, synthetic construct; identical to SEQ ID NO: 484
  source 1..220: note = XENP44804 Chain 2- STEAP-A[STEAP1]_L1_Light Chain

SEQ ID NO: 720 - protein, 453 aa, synthetic construct
  source 1..453: note = XENP44805 Chain 1- STEAP-A[STEAP1]_H1.2_IgG1_PVA_/S267K
QVQVQESGPGLVKPSQTLSLTCTVSGYSITSDYAWNWIRQPPGKGLEWIGYISNSGSTSYNPSLKSRVTISRDTSKNQFSLKLSSVTAADTAVYYCARERNYDYDDYYYAMDYWGQGTLVTVSSASTKGPSVFPLAPSSKSTSGGTAALGCLVKDYFPEPVTVSWNSGALTSGVHTFPAVLQSSGLYSLSSVVTVPSSSLGTQTYICNVNHKPSNTKVDKKVEPKSCDKTHTCPPCPAPPVAGPSVFLFPPKPKDTLMISRTPEVTCVVVDVKHEDPEVKFNWYVDGVEVHNAKTKPREEQYNSTYRVVSVLTVLHQDWLNGKEYKCKVSNKALPAPIEKTISKAKGQPREPQVYTLPPSREEMTKNQVSLTCLVKGFYPSDIAVEWESNGQPENNYKTTPPVLDSDGSFFLYSKLTVDKSRWQQGNVFSCSVMHEALHNHYTQKSLSLSPGK

SEQ ID NO: 721 - protein, 220 aa, synthetic construct; identical to SEQ ID NO: 484
  source 1..220: note = XENP44805 Chain 2- STEAP-A[STEAP1]_L1_Light Chain

SEQ ID NO: 722 - protein, 453 aa, synthetic construct
  source 1..453: note = XENP44806 Chain 1- STEAP-A[STEAP1]_H1.3_IgG1_PVA_/S267K
QVQLQESGPGLVKPSQTLSLTCTVSGYSITSDYAWNWIRQPPGKGLEWIGYISNSGSTSYNPSLKSRVTISRDTSKNQFSLKLSSVTAADTAVYYCARERNYDYDDYYYAMDYWGQGTLVTVSSASTKGPSVFPLAPSSKSTSGGTAALGCLVKDYFPEPVTVSWNSGALTSGVHTFPAVLQSSGLYSLSSVVTVPSSSLGTQTYICNVNHKPSNTKVDKKVEPKSCDKTHTCPPCPAPPVAGPSVFLFPPKPKDTLMISRTPEVTCVVVDVKHEDPEVKFNWYVDGVEVHNAKTKPREEQYNSTYRVVSVLTVLHQDWLNGKEYKCKVSNKALPAPIEKTISKAKGQPREPQVYTLPPSREEMTKNQVSLTCLVKGFYPSDIAVEWESNGQPENNYKTTPPVLDSDGSFFLYSKLTVDKSRWQQGNVFSCSVMHEALHNHYTQKSLSLSPGK

SEQ ID NO: 723 - protein, 220 aa, synthetic construct; identical to SEQ ID NO: 484
  source 1..220: note = XENP44806 Chain 2- STEAP-A[STEAP1]_L1_Light Chain

SEQ ID NO: 724 - protein, 453 aa, synthetic construct
  source 1..453: note = XENP44807 Chain 1- STEAP-A[STEAP1]_H1.4_IgG1_PVA_/S267K
QVQVQESGPGLVKPSQTLSLTCTVSGYSITSDYAWNWIRQPPGKKLEWIGYISNSGSTSYNPSLKSRVTISRDTSKNQFSLKLSSVTAADTAVYYCARERNYDYADYYYAMDYWGQGTLVTVSSASTKGPSVFPLAPSSKSTSGGTAALGCLVKDYFPEPVTVSWNSGALTSGVHTFPAVLQSSGLYSLSSVVTVPSSSLGTQTYICNVNHKPSNTKVDKKVEPKSCDKTHTCPPCPAPPVAGPSVFLFPPKPKDTLMISRTPEVTCVVVDVKHEDPEVKFNWYVDGVEVHNAKTKPREEQYNSTYRVVSVLTVLHQDWLNGKEYKCKVSNKALPAPIEKTISKAKGQPREPQVYTLPPSREEMTKNQVSLTCLVKGFYPSDIAVEWESNGQPENNYKTTPPVLDSDGSFFLYSKLTVDKSRWQQGNVFSCSVMHEALHNHYTQKSLSLSPGK

SEQ ID NO: 725 - protein, 220 aa, synthetic construct; identical to SEQ ID NO: 484
  source 1..220: note = XENP44807 Chain 2- STEAP-A[STEAP1]_L1_Light Chain

SEQ ID NO: 726 - protein, 453 aa, synthetic construct
  source 1..453: note = XENP44808 Chain 1- STEAP-A[STEAP1]_H1.5_IgG1_PVA_/S267K
QVQVQESGPGLVKPSQTLSLTCTVSGYSITSDYAWNWIRQPPGKKLEWIGYISNSGSTSYNPSLKSRVTISRDTSKNQFSLKLSSVTAADTAVYYCARERNYDYEDYYYAMDYWGQGTLVTVSSASTKGPSVFPLAPSSKSTSGGTAALGCLVKDYFPEPVTVSWNSGALTSGVHTFPAVLQSSGLYSLSSVVTVPSSSLGTQTYICNVNHKPSNTKVDKKVEPKSCDKTHTCPPCPAPPVAGPSVFLFPPKPKDTLMISRTPEVTCVVVDVKHEDPEVKFNWYVDGVEVHNAKTKPREEQYNSTYRVVSVLTVLHQDWLNGKEYKCKVSNKALPAPIEKTISKAKGQPREPQVYTLPPSREEMTKNQVSLTCLVKGFYPSDIAVEWESNGQPENNYKTTPPVLDSDGSFFLYSKLTVDKSRWQQGNVFSCSVMHEALHNHYTQKSLSLSPGK

SEQ ID NO: 727 - protein, 220 aa, synthetic construct; identical to SEQ ID NO: 484
  source 1..220: note = XENP44808 Chain 2- STEAP-A[STEAP1]_L1_Light Chain

SEQ ID NO: 728 - protein, 453 aa, synthetic construct
  source 1..453: note = XENP44809 Chain 1- STEAP-A[STEAP1]_H1.6_IgG1_PVA_/S267K
QVQVQESGPGLVKPSQTLSLTCTVSGYSITSDYAWNWIRQPPGKKLEWIGYISNSGSTSYNPSLKSRVTISRDTSKNQFSLKLSSVTAADTAVYYCARERNYDYLDYYYAMDYWGQGTLVTVSSASTKGPSVFPLAPSSKSTSGGTAALGCLVKDYFPEPVTVSWNSGALTSGVHTFPAVLQSSGLYSLSSVVTVPSSSLGTQTYICNVNHKPSNTKVDKKVEPKSCDKTHTCPPCPAPPVAGPSVFLFPPKPKDTLMISRTPEVTCVVVDVKHEDPEVKFNWYVDGVEVHNAKTKPREEQYNSTYRVVSVLTVLHQDWLNGKEYKCKVSNKALPAPIEKTISKAKGQPREPQVYTLPPSREEMTKNQVSLTCLVKGFYPSDIAVEWESNGQPENNYKTTPPVLDSDGSFFLYSKLTVDKSRWQQGNVFSCSVMHEALHNHYTQKSLSLSPGK

SEQ ID NO: 729 - protein, 220 aa, synthetic construct; identical to SEQ ID NO: 484
  source 1..220: note = XENP44809 Chain 2- STEAP-A[STEAP1]_L1_Light Chain

SEQ ID NO: 730 - protein, 453 aa, synthetic construct
  source 1..453: note = XENP44810 Chain 1- STEAP-A[STEAP1]_H1.7_IgG1_PVA_/S267K
QVQVQESGPGLVKPSQTLSLTCTVSGYSITSDYAWNWIRQPPGKKLEWIGYISNSGSTSYNPSLKSRVTISRDTSKNQFSLKLSSVTAADTAVYYCARERNYDYQDYYYAMDYWGQGTLVTVSSASTKGPSVFPLAPSSKSTSGGTAALGCLVKDYFPEPVTVSWNSGALTSGVHTFPAVLQSSGLYSLSSVVTVPSSSLGTQTYICNVNHKPSNTKVDKKVEPKSCDKTHTCPPCPAPPVAGPSVFLFPPKPKDTLMISRTPEVTCVVVDVKHEDPEVKFNWYVDGVEVHNAKTKPREEQYNSTYRVVSVLTVLHQDWLNGKEYKCKVSNKALPAPIEKTISKAKGQPREPQVYTLPPSREEMTKNQVSLTCLVKGFYPSDIAVEWESNGQPENNYKTTPPVLDSDGSFFLYSKLTVDKSRWQQGNVFSCSVMHEALHNHYTQKSLSLSPGK

SEQ ID NO: 731 - protein, 220 aa, synthetic construct; identical to SEQ ID NO: 484
  source 1..220: note = XENP44810 Chain 2- STEAP-A[STEAP1]_L1_Light Chain

SEQ ID NO: 732 - protein, 453 aa, synthetic construct
  source 1..453: note = XENP44811 Chain 1- STEAP-A[STEAP1]_H1.8_IgG1_PVA_/S267K
QVQVQESGPGLVKPSQTLSLTCTVSGYSITSDYAWNWIRQPPGKKLEWIGYISNSGSTSYNPSLKSRVTISRDTSKNQFSLKLSSVTAADTAVYYCARERNYDYTDYYYAMDYWGQGTLVTVSSASTKGPSVFPLAPSSKSTSGGTAALGCLVKDYFPEPVTVSWNSGALTSGVHTFPAVLQSSGLYSLSSVVTVPSSSLGTQTYICNVNHKPSNTKVDKKVEPKSCDKTHTCPPCPAPPVAGPSVFLFPPKPKDTLMISRTPEVTCVVVDVKHEDPEVKFNWYVDGVEVHNAKTKPREEQYNSTYRVVSVLTVLHQDWLNGKEYKCKVSNKALPAPIEKTISKAKGQPREPQVYTLPPSREEMTKNQVSLTCLVKGFYPSDIAVEWESNGQPENNYKTTPPVLDSDGSFFLYSKLTVDKSRWQQGNVFSCSVMHEALHNHYTQKSLSLSPGK

SEQ ID NO: 733 - protein, 220 aa, synthetic construct; identical to SEQ ID NO: 484
  source 1..220: note = XENP44811 Chain 2- STEAP-A[STEAP1]_L1_Light Chain

SEQ ID NO: 734 - protein, 453 aa, synthetic construct
  source 1..453: note = XENP44812 Chain 1- STEAP-A[STEAP1]_H1.9_IgG1_PVA_/S267K
QVQVQESGPGLVKPSQTLSLTCTVSGYSITSDYAWNWIRQPPGKKLEWIGYISNSGSTSYNPSLKSRVTISRDTSKNQFSLKLSSVTAADTAVYYCARERNYDYDAYYYAMDYWGQGTLVTVSSASTKGPSVFPLAPSSKSTSGGTAALGCLVKDYFPEPVTVSWNSGALTSGVHTFPAVLQSSGLYSLSSVVTVPSSSLGTQTYICNVNHKPSNTKVDKKVEPKSCDKTHTCPPCPAPPVAGPSVFLFPPKPKDTLMISRTPEVTCVVVDVKHEDPEVKFNWYVDGVEVHNAKTKPREEQYNSTYRVVSVLTVLHQDWLNGKEYKCKVSNKALPAPIEKTISKAKGQPREPQVYTLPPSREEMTKNQVSLTCLVKGFYPSDIAVEWESNGQPENNYKTTPPVLDSDGSFFLYSKLTVDKSRWQQGNVFSCSVMHEALHNHYTQKSLSLSPGK

SEQ ID NO: 735 - protein, 220 aa, synthetic construct; identical to SEQ ID NO: 484
  source 1..220: note = XENP44812 Chain 2- STEAP-A[STEAP1]_L1_Light Chain

SEQ ID NO: 736 - protein, 453 aa, synthetic construct
  source 1..453: note = XENP44813 Chain 1- STEAP-A[STEAP1]_H1.10_IgG1_PVA_/S267K
QVQVQESGPGLVKPSQTLSLTCTVSGYSITSDYAWNWIRQPPGKKLEWIGYISNSGSTSYNPSLKSRVTISRDTSKNQFSLKLSSVTAADTAVYYCARERNYDYDEYYYAMDYWGQGTLVTVSSASTKGPSVFPLAPSSKSTSGGTAALGCLVKDYFPEPVTVSWNSGALTSGVHTFPAVLQSSGLYSLSSVVTVPSSSLGTQTYICNVNHKPSNTKVDKKVEPKSCDKTHTCPPCPAPPVAGPSVFLFPPKPKDTLMISRTPEVTCVVVDVKHEDPEVKFNWYVDGVEVHNAKTKPREEQYNSTYRVVSVLTVLHQDWLNGKEYKCKVSNKALPAPIEKTISKAKGQPREPQVYTLPPSREEMTKNQVSLTCLVKGFYPSDIAVEWESNGQPENNYKTTPPVLDSDGSFFLYSKLTVDKSRWQQGNVFSCSVMHEALHNHYTQKSLSLSPGK

SEQ ID NO: 737 - protein, 220 aa, synthetic construct; identical to SEQ ID NO: 484
  source 1..220: note = XENP44813 Chain 2- STEAP-A[STEAP1]_L1_Light Chain

SEQ ID NO: 738 - protein, 453 aa, synthetic construct
  source 1..453: note = XENP44814 Chain 1- STEAP-A[STEAP1]_H1.11_IgG1_PVA_/S267K
QVQVQESGPGLVKPSQTLSLTCTVSGYSITSDYAWNWIRQPPGKKLEWIGYISNSGSTSYNPSLKSRVTISRDTSKNQFSLKLSSVTAADTAVYYCARERNYDYDLYYYAMDYWGQGTLVTVSSASTKGPSVFPLAPSSKSTSGGTAALGCLVKDYFPEPVTVSWNSGALTSGVHTFPAVLQSSGLYSLSSVVTVPSSSLGTQTYICNVNHKPSNTKVDKKVEPKSCDKTHTCPPCPAPPVAGPSVFLFPPKPKDTLMISRTPEVTCVVVDVKHEDPEVKFNWYVDGVEVHNAKTKPREEQYNSTYRVVSVLTVLHQDWLNGKEYKCKVSNKALPAPIEKTISKAKGQPREPQVYTLPPSREEMTKNQVSLTCLVKGFYPSDIAVEWESNGQPENNYKTTPPVLDSDGSFFLYSKLTVDKSRWQQGNVFSCSVMHEALHNHYTQKSLSLSPGK

SEQ ID NO: 739 - protein, 220 aa, synthetic construct; identical to SEQ ID NO: 484
  source 1..220: note = XENP44814 Chain 2- STEAP-A[STEAP1]_L1_Light Chain

SEQ ID NO: 740 - protein, 453 aa, synthetic construct
  source 1..453: note = XENP44815 Chain 1- STEAP-A[STEAP1]_H1.12_IgG1_PVA_/S267K
QVQVQESGPGLVKPSQTLSLTCTVSGYSITSDYAWNWIRQPPGKKLEWIGYISNSGSTSYNPSLKSRVTISRDTSKNQFSLKLSSVTAADTAVYYCARERNYDYDQYYYAMDYWGQGTLVTVSSASTKGPSVFPLAPSSKSTSGGTAALGCLVKDYFPEPVTVSWNSGALTSGVHTFPAVLQSSGLYSLSSVVTVPSSSLGTQTYICNVNHKPSNTKVDKKVEPKSCDKTHTCPPCPAPPVAGPSVFLFPPKPKDTLMISRTPEVTCVVVDVKHEDPEVKFNWYVDGVEVHNAKTKPREEQYNSTYRVVSVLTVLHQDWLNGKEYKCKVSNKALPAPIEKTISKAKGQPREPQVYTLPPSREEMTKNQVSLTCLVKGFYPSDIAVEWESNGQPENNYKTTPPVLDSDGSFFLYSKLTVDKSRWQQGNVFSCSVMHEALHNHYTQKSLSLSPGK

SEQ ID NO: 741 - protein, 220 aa, synthetic construct; identical to SEQ ID NO: 484
  source 1..220: note = XENP44815 Chain 2- STEAP-A[STEAP1]_L1_Light Chain

SEQ ID NO: 742 - protein, 453 aa, synthetic construct
  source 1..453: note = XENP44816 Chain 1- STEAP-A[STEAP1]_H1.13_IgG1_PVA_/S267K
QVQVQESGPGLVKPSQTLSLTCTVSGYSITSDYAWNWIRQPPGKKLEWIGYISNSGSTSYNPSLKSRVTISRDTSKNQFSLKLSSVTAADTAVYYCARERNYDYDTYYYAMDYWGQGTLVTVSSASTKGPSVFPLAPSSKSTSGGTAALGCLVKDYFPEPVTVSWNSGALTSGVHTFPAVLQSSGLYSLSSVVTVPSSSLGTQTYICNVNHKPSNTKVDKKVEPKSCDKTHTCPPCPAPPVAGPSVFLFPPKPKDTLMISRTPEVTCVVVDVKHEDPEVKFNWYVDGVEVHNAKTKPREEQYNSTYRVVSVLTVLHQDWLNGKEYKCKVSNKALPAPIEKTISKAKGQPREPQVYTLPPSREEMTKNQVSLTCLVKGFYPSDIAVEWESNGQPENNYKTTPPVLDSDGSFFLYSKLTVDKSRWQQGNVFSCSVMHEALHNHYTQKSLSLSPGK

SEQ ID NO: 743 - protein, 220 aa, synthetic construct; identical to SEQ ID NO: 484
  source 1..220: note = XENP44816 Chain 2- STEAP-A[STEAP1]_L1_Light Chain

SEQ ID NO: 744 - protein, 453 aa, synthetic construct
  source 1..453: note = XENP44817 Chain 1- STEAP-A[STEAP1]_H1.14_IgG1_PVA_/S267K
QVQVQESGPGLVKPSQTLSLTCTVSGYSITSDYAWNWIRQPPGKKLEWIGYISNSGSTSYNPSLKSRVTISRDTSKNQFSLKLSSVTAADTAVYYCARERNYDYAAYYYAMDYWGQGTLVTVSSASTKGPSVFPLAPSSKSTSGGTAALGCLVKDYFPEPVTVSWNSGALTSGVHTFPAVLQSSGLYSLSSVVTVPSSSLGTQTYICNVNHKPSNTKVDKKVEPKSCDKTHTCPPCPAPPVAGPSVFLFPPKPKDTLMISRTPEVTCVVVDVKHEDPEVKFNWYVDGVEVHNAKTKPREEQYNSTYRVVSVLTVLHQDWLNGKEYKCKVSNKALPAPIEKTISKAKGQPREPQVYTLPPSREEMTKNQVSLTCLVKGFYPSDIAVEWESNGQPENNYKTTPPVLDSDGSFFLYSKLTVDKSRWQQGNVFSCSVMHEALHNHYTQKSLSLSPGK

SEQ ID NO: 745 - protein, 220 aa, synthetic construct; identical to SEQ ID NO: 484
  source 1..220: note = XENP44817 Chain 2- STEAP-A[STEAP1]_L1_Light Chain

SEQ ID NO: 746 - protein, 453 aa, synthetic construct
  source 1..453: note = XENP44818 Chain 1- STEAP-A[STEAP1]_H1.15_IgG1_PVA_/S267K
QVQVQESGPGLVKPSQTLSLTCTVSGYSITSDYAWNWIRQPPGKKLEWIGYISNSGSTSYNPSLKSRVTISRDTSKNQFSLKLSSVTAADTAVYYCARERNYDYAEYYYAMDYWGQGTLVTVSSASTKGPSVFPLAPSSKSTSGGTAALGCLVKDYFPEPVTVSWNSGALTSGVHTFPAVLQSSGLYSLSSVVTVPSSSLGTQTYICNVNHKPSNTKVDKKVEPKSCDKTHTCPPCPAPPVAGPSVFLFPPKPKDTLMISRTPEVTCVVVDVKHEDPEVKFNWYVDGVEVHNAKTKPREEQYNSTYRVVSVLTVLHQDWLNGKEYKCKVSNKALPAPIEKTISKAKGQPREPQVYTLPPSREEMTKNQVSLTCLVKGFYPSDIAVEWESNGQPENNYKTTPPVLDSDGSFFLYSKLTVDKSRWQQGNVFSCSVMHEALHNHYTQKSLSLSPGK

SEQ ID NO: 747 - protein, 220 aa, synthetic construct; identical to SEQ ID NO: 484
  source 1..220: note = XENP44818 Chain 2- STEAP-A[STEAP1]_L1_Light Chain

SEQ ID NO: 748 - protein, 453 aa, synthetic construct
  source 1..453: note = XENP44819 Chain 1- STEAP-A[STEAP1]_H1.16_IgG1_PVA_/S267K
QVQVQESGPGLVKPSQTLSLTCTVSGYSITSDYAWNWIRQPPGKKLEWIGYISNSGSTSYNPSLKSRVTISRDTSKNQFSLKLSSVTAADTAVYYCARERNYDYALYYYAMDYWGQGTLVTVSSASTKGPSVFPLAPSSKSTSGGTAALGCLVKDYFPEPVTVSWNSGALTSGVHTFPAVLQSSGLYSLSSVVTVPSSSLGTQTYICNVNHKPSNTKVDKKVEPKSCDKTHTCPPCPAPPVAGPSVFLFPPKPKDTLMISRTPEVTCVVVDVKHEDPEVKFNWYVDGVEVHNAKTKPREEQYNSTYRVVSVLTVLHQDWLNGKEYKCKVSNKALPAPIEKTISKAKGQPREPQVYTLPPSREEMTKNQVSLTCLVKGFYPSDIAVEWESNGQPENNYKTTPPVLDSDGSFFLYSKLTVDKSRWQQGNVFSCSVMHEALHNHYTQKSLSLSPGK

SEQ ID NO: 749 - protein, 220 aa, synthetic construct; identical to SEQ ID NO: 484
  source 1..220: note = XENP44819 Chain 2- STEAP-A[STEAP1]_L1_Light Chain

SEQ ID NO: 750 - protein, 453 aa, synthetic construct
  source 1..453: note = XENP44820 Chain 1- STEAP-A[STEAP1]_H1.17_IgG1_PVA_/S267K
QVQVQESGPGLVKPSQTLSLTCTVSGYSITSDYAWNWIRQPPGKKLEWIGYISNSGSTSYNPSLKSRVTISRDTSKNQFSLKLSSVTAADTAVYYCARERNYDYAQYYYAMDYWGQGTLVTVSSASTKGPSVFPLAPSSKSTSGGTAALGCLVKDYFPEPVTVSWNSGALTSGVHTFPAVLQSSGLYSLSSVVTVPSSSLGTQTYICNVNHKPSNTKVDKKVEPKSCDKTHTCPPCPAPPVAGPSVFLFPPKPKDTLMISRTPEVTCVVVDVKHEDPEVKFNWYVDGVEVHNAKTKPREEQYNSTYRVVSVLTVLHQDWLNGKEYKCKVSNKALPAPIEKTISKAKGQPREPQVYTLPPSREEMTKNQVSLTCLVKGFYPSDIAVEWESNGQPENNYKTTPPVLDSDGSFFLYSKLTVDKSRWQQGNVFSCSVMHEALHNHYTQKSLSLSPGK

SEQ ID NO: 751 - protein, 220 aa, synthetic construct; identical to SEQ ID NO: 484
  source 1..220: note = XENP44820 Chain 2- STEAP-A[STEAP1]_L1_Light Chain

SEQ ID NO: 752 - protein, 453 aa, synthetic construct
  source 1..453: note = XENP44821 Chain 1- STEAP-A[STEAP1]_H1.18_IgG1_PVA_/S267K
QVQVQESGPGLVKPSQTLSLTCTVSGYSITSDYAWNWIRQPPGKKLEWIGYISNSGSTSYNPSLKSRVTISRDTSKNQFSLKLSSVTAADTAVYYCARERNYDYATYYYAMDYWGQGTLVTVSSASTKGPSVFPLAPSSKSTSGGTAALGCLVKDYFPEPVTVSWNSGALTSGVHTFPAVLQSSGLYSLSSVVTVPSSSLGTQTYICNVNHKPSNTKVDKKVEPKSCDKTHTCPPCPAPPVAGPSVFLFPPKPKDTLMISRTPEVTCVVVDVKHEDPEVKFNWYVDGVEVHNAKTKPREEQYNSTYRVVSVLTVLHQDWLNGKEYKCKVSNKALPAPIEKTISKAKGQPREPQVYTLPPSREEMTKNQVSLTCLVKGFYPSDIAVEWESNGQPENNYKTTPPVLDSDGSFFLYSKLTVDKSRWQQGNVFSCSVMHEALHNHYTQKSLSLSPGK

SEQ ID NO: 753 - protein, 220 aa, synthetic construct; identical to SEQ ID NO: 484
  source 1..220: note = XENP44821 Chain 2- STEAP-A[STEAP1]_L1_Light Chain

SEQ ID NO: 754 - protein, 453 aa, synthetic construct
  source 1..453: note = XENP44822 Chain 1- STEAP-A[STEAP1]_H1.19_IgG1_PVA_/S267K
QVQVQESGPGLVKPSQTLSLTCTVSGYSITSDYAWNWIRQPPGKKLEWIGYISNSGSTSYNPSLKSRVTISRDTSKNQFSLKLSSVTAADTAVYYCARERNYDYEAYYYAMDYWGQGTLVTVSSASTKGPSVFPLAPSSKSTSGGTAALGCLVKDYFPEPVTVSWNSGALTSGVHTFPAVLQSSGLYSLSSVVTVPSSSLGTQTYICNVNHKPSNTKVDKKVEPKSCDKTHTCPPCPAPPVAGPSVFLFPPKPKDTLMISRTPEVTCVVVDVKHEDPEVKFNWYVDGVEVHNAKTKPREEQYNSTYRVVSVLTVLHQDWLNGKEYKCKVSNKALPAPIEKTISKAKGQPREPQVYTLPPSREEMTKNQVSLTCLVKGFYPSDIAVEWESNGQPENNYKTTPPVLDSDGSFFLYSKLTVDKSRWQQGNVFSCSVMHEALHNHYTQKSLSLSPGK

SEQ ID NO: 755 - protein, 220 aa, synthetic construct; identical to SEQ ID NO: 484
  source 1..220: note = XENP44822 Chain 2- STEAP-A[STEAP1]_L1_Light Chain

SEQ ID NO: 756 - protein, 453 aa, synthetic construct
  source 1..453: note = XENP44823 Chain 1- STEAP-A[STEAP1]_H1.20_IgG1_PVA_/S267K
QVQVQESGPGLVKPSQTLSLTCTVSGYSITSDYAWNWIRQPPGKKLEWIGYISNSGSTSYNPSLKSRVTISRDTSKNQFSLKLSSVTAADTAVYYCARERNYDYEEYYYAMDYWGQGTLVTVSSASTKGPSVFPLAPSSKSTSGGTAALGCLVKDYFPEPVTVSWNSGALTSGVHTFPAVLQSSGLYSLSSVVTVPSSSLGTQTYICNVNHKPSNTKVDKKVEPKSCDKTHTCPPCPAPPVAGPSVFLFPPKPKDTLMISRTPEVTCVVVDVKHEDPEVKFNWYVDGVEVHNAKTKPREEQYNSTYRVVSVLTVLHQDWLNGKEYKCKVSNKALPAPIEKTISKAKGQPREPQVYTLPPSREEMTKNQVSLTCLVKGFYPSDIAVEWESNGQPENNYKTTPPVLDSDGSFFLYSKLTVDKSRWQQGNVFSCSVMHEALHNHYTQKSLSLSPGK

SEQ ID NO: 757 - protein, 220 aa, synthetic construct; identical to SEQ ID NO: 484
  source 1..220: note = XENP44823 Chain 2- STEAP-A[STEAP1]_L1_Light Chain

SEQ ID NO: 758 - protein, 453 aa, synthetic construct
  source 1..453: note = XENP44824 Chain 1- STEAP-A[STEAP1]_H1.21_IgG1_PVA_/S267K
QVQVQESGPGLVKPSQTLSLTCTVSGYSITSDYAWNWIRQPPGKKLEWIGYISNSGSTSYNPSLKSRVTISRDTSKNQFSLKLSSVTAADTAVYYCARERNYDYELYYYAMDYWGQGTLVTVSSASTKGPSVFPLAPSSKSTSGGTAALGCLVKDYFPEPVTVSWNSGALTSGVHTFPAVLQSSGLYSLSSVVTVPSSSLGTQTYICNVNHKPSNTKVDKKVEPKSCDKTHTCPPCPAPPVAGPSVFLFPPKPKDTLMISRTPEVTCVVVDVKHEDPEVKFNWYVDGVEVHNAKTKPREEQYNSTYRVVSVLTVLHQDWLNGKEYKCKVSNKALPAPIEKTISKAKGQPREPQVYTLPPSREEMTKNQVSLTCLVKGFYPSDIAVEWESNGQPENNYKTTPPVLDSDGSFFLYSKLTVDKSRWQQGNVFSCSVMHEALHNHYTQKSLSLSPGK

SEQ ID NO: 759 - protein, 220 aa, synthetic construct; identical to SEQ ID NO: 484
  source 1..220: note = XENP44824 Chain 2- STEAP-A[STEAP1]_L1_Light Chain

SEQ ID NO: 760 - protein, 453 aa, synthetic construct
  source 1..453: note = XENP44825 Chain 1- STEAP-A[STEAP1]_H1.22_IgG1_PVA_/S267K
QVQVQESGPGLVKPSQTLSLTCTVSGYSITSDYAWNWIRQPPGKKLEWIGYISNSGSTSYNPSLKSRVTISRDTSKNQFSLKLSSVTAADTAVYYCARERNYDYEQYYYAMDYWGQGTLVTVSSASTKGPSVFPLAPSSKSTSGGTAALGCLVKDYFPEPVTVSWNSGALTSGVHTFPAVLQSSGLYSLSSVVTVPSSSLGTQTYICNVNHKPSNTKVDKKVEPKSCDKTHTCPPCPAPPVAGPSVFLFPPKPKDTLMISRTPEVTCVVVDVKHEDPEVKFNWYVDGVEVHNAKTKPREEQYNSTYRVVSVLTVLHQDWLNGKEYKCKVSNKALPAPIEKTISKAKGQPREPQVYTLPPSREEMTKNQVSLTCLVKGFYPSDIAVEWESNGQPENNYKTTPPVLDSDGSFFLYSKLTVDKSRWQQGNVFSCSVMHEALHNHYTQKSLSLSPGK

SEQ ID NO: 761 - protein, 220 aa, synthetic construct; identical to SEQ ID NO: 484
  source 1..220: note = XENP44825 Chain 2- STEAP-A[STEAP1]_L1_Light Chain

SEQ ID NO: 762 - protein, 453 aa, synthetic construct
  source 1..453: note = XENP44826 Chain 1- STEAP-A[STEAP1]_H1.23_IgG1_PVA_/S267K
QVQVQESGPGLVKPSQTLSLTCTVSGYSITSDYAWNWIRQPPGKKLEWIGYISNSGSTSYNPSLKSRVTISRDTSKNQFSLKLSSVTAADTAVYYCARERNYDYETYYYAMDYWGQGTLVTVSSASTKGPSVFPLAPSSKSTSGGTAALGCLVKDYFPEPVTVSWNSGALTSGVHTFPAVLQSSGLYSLSSVVTVPSSSLGTQTYICNVNHKPSNTKVDKKVEPKSCDKTHTCPPCPAPPVAGPSVFLFPPKPKDTLMISRTPEVTCVVVDVKHEDPEVKFNWYVDGVEVHNAKTKPREEQYNSTYRVVSVLTVLHQDWLNGKEYKCKVSNKALPAPIEKTISKAKGQPREPQVYTLPPSREEMTKNQVSLTCLVKGFYPSDIAVEWESNGQPENNYKTTPPVLDSDGSFFLYSKLTVDKSRWQQGNVFSCSVMHEALHNHYTQKSLSLSPGK

SEQ ID NO: 763 - protein, 220 aa, synthetic construct; identical to SEQ ID NO: 484
  source 1..220: note = XENP44826 Chain 2- STEAP-A[STEAP1]_L1_Light Chain

SEQ ID NO: 764 - protein, 453 aa, synthetic construct
  source 1..453: note = XENP44827 Chain 1- STEAP-A[STEAP1]_H1.24_IgG1_PVA_/S267K
QVQVQESGPGLVKPSQTLSLTCTVSGYSITSDYAWNWIRQPPGKKLEWIGYISNSGSTSYNPSLKSRVTISRDTSKNQFSLKLSSVTAADTAVYYCARERNYDYLAYYYAMDYWGQGTLVTVSSASTKGPSVFPLAPSSKSTSGGTAALGCLVKDYFPEPVTVSWNSGALTSGVHTFPAVLQSSGLYSLSSVVTVPSSSLGTQTYICNVNHKPSNTKVDKKVEPKSCDKTHTCPPCPAPPVAGPSVFLFPPKPKDTLMISRTPEVTCVVVDVKHEDPEVKFNWYVDGVEVHNAKTKPREEQYNSTYRVVSVLTVLHQDWLNGKEYKCKVSNKALPAPIEKTISKAKGQPREPQVYTLPPSREEMTKNQVSLTCLVKGFYPSDIAVEWESNGQPENNYKTTPPVLDSDGSFFLYSKLTVDKSRWQQGNVFSCSVMHEALHNHYTQKSLSLSPGK

SEQ ID NO: 765 - protein, 220 aa, synthetic construct; identical to SEQ ID NO: 484
  source 1..220: note = XENP44827 Chain 2- STEAP-A[STEAP1]_L1_Light Chain

SEQ ID NO: 766 - protein, 453 aa, synthetic construct
  source 1..453: note = XENP44828 Chain 1- STEAP-A[STEAP1]_H1.25_IgG1_PVA_/S267K
QVQVQESGPGLVKPSQTLSLTCTVSGYSITSDYAWNWIRQPPGKKLEWIGYISNSGSTSYNPSLKSRVTISRDTSKNQFSLKLSSVTAADTAVYYCARERNYDYLEYYYAMDYWGQGTLVTVSSASTKGPSVFPLAPSSKSTSGGTAALGCLVKDYFPEPVTVSWNSGALTSGVHTFPAVLQSSGLYSLSSVVTVPSSSLGTQTYICNVNHKPSNTKVDKKVEPKSCDKTHTCPPCPAPPVAGPSVFLFPPKPKDTLMISRTPEVTCVVVDVKHEDPEVKFNWYVDGVEVHNAKTKPREEQYNSTYRVVSVLTVLHQDWLNGKEYKCKVSNKALPAPIEKTISKAKGQPREPQVYTLPPSREEMTKNQVSLTCLVKGFYPSDIAVEWESNGQPENNYKTTPPVLDSDGSFFLYSKLTVDKSRWQQGNVFSCSVMHEALHNHYTQKSLSLSPGK

SEQ ID NO: 767 - protein, 220 aa, synthetic construct; identical to SEQ ID NO: 484
  source 1..220: note = XENP44828 Chain 2- STEAP-A[STEAP1]_L1_Light Chain

SEQ ID NO: 768 - protein, 453 aa, synthetic construct
  source 1..453: note = XENP44829 Chain 1- STEAP-A[STEAP1]_H1.26_IgG1_PVA_/S267K
QVQVQESGPGLVKPSQTLSLTCTVSGYSITSDYAWNWIRQPPGKKLEWIGYISNSGSTSYNPSLKSRVTISRDTSKNQFSLKLSSVTAADTAVYYCARERNYDYLLYYYAMDYWGQGTLVTVSSASTKGPSVFPLAPSSKSTSGGTAALGCLVKDYFPEPVTVSWNSGALTSGVHTFPAVLQSSGLYSLSSVVTVPSSSLGTQTYICNVNHKPSNTKVDKKVEPKSCDKTHTCPPCPAPPVAGPSVFLFPPKPKDTLMISRTPEVTCVVVDVKHEDPEVKFNWYVDGVEVHNAKTKPREEQYNSTYRVVSVLTVLHQDWLNGKEYKCKVSNKALPAPIEKTISKAKGQPREPQVYTLPPSREEMTKNQVSLTCLVKGFYPSDIAVEWESNGQPENNYKTTPPVLDSDGSFFLYSKLTVDKSRWQQGNVFSCSVMHEALHNHYTQKSLSLSPGK

SEQ ID NO: 769 - protein, 220 aa, synthetic construct; identical to SEQ ID NO: 484
  source 1..220: note = XENP44829 Chain 2- STEAP-A[STEAP1]_L1_Light Chain

SEQ ID NO: 770 - protein, 453 aa, synthetic construct
  source 1..453: note = XENP44830 Chain 1- STEAP-A[STEAP1]_H1.27_IgG1_PVA_/S267K
QVQVQESGPGLVKPSQTLSLTCTVSGYSITSDYAWNWIRQPPGKKLEWIGYISNSGSTSYNPSLKSRVTISRDTSKNQFSLKLSSVTAADTAVYYCARERNYDYLQYYYAMDYWGQGTLVTVSSASTKGPSVFPLAPSSKSTSGGTAALGCLVKDYFPEPVTVSWNSGALTSGVHTFPAVLQSSGLYSLSSVVTVPSSSLGTQTYICNVNHKPSNTKVDKKVEPKSCDKTHTCPPCPAPPVAGPSVFLFPPKPKDTLMISRTPEVTCVVVDVKHEDPEVKFNWYVDGVEVHNAKTKPREEQYNSTYRVVSVLTVLHQDWLNGKEYKCKVSNKALPAPIEKTISKAKGQPREPQVYTLPPSREEMTKNQVSLTCLVKGFYPSDIAVEWESNGQPENNYKTTPPVLDSDGSFFLYSKLTVDKSRWQQGNVFSCSVMHEALHNHYTQKSLSLSPGK

SEQ ID NO: 771 - protein, 220 aa, synthetic construct; identical to SEQ ID NO: 484
  source 1..220: note = XENP44830 Chain 2- STEAP-A[STEAP1]_L1_Light Chain

SEQ ID NO: 772 - protein, 453 aa, synthetic construct
  source 1..453: note = XENP44831 Chain 1- STEAP-A[STEAP1]_H1.28_IgG1_PVA_/S267K
QVQVQESGPGLVKPSQTLSLTCTVSGYSITSDYAWNWIRQPPGKKLEWIGYISNSGSTSYNPSLKSRVTISRDTSKNQFSLKLSSVTAADTAVYYCARERNYDYLTYYYAMDYWGQGTLVTVSSASTKGPSVFPLAPSSKSTSGGTAALGCLVKDYFPEPVTVSWNSGALTSGVHTFPAVLQSSGLYSLSSVVTVPSSSLGTQTYICNVNHKPSNTKVDKKVEPKSCDKTHTCPPCPAPPVAGPSVFLFPPKPKDTLMISRTPEVTCVVVDVKHEDPEVKFNWYVDGVEVHNAKTKPREEQYNSTYRVVSVLTVLHQDWLNGKEYKCKVSNKALPAPIEKTISKAKGQPREPQVYTLPPSREEMTKNQVSLTCLVKGFYPSDIAVEWESNGQPENNYKTTPPVLDSDGSFFLYSKLTVDKSRWQQGNVFSCSVMHEALHNHYTQKSLSLSPGK

SEQ ID NO: 773 - protein, 220 aa, synthetic construct; identical to SEQ ID NO: 484
  source 1..220: note = XENP44831 Chain 2- STEAP-A[STEAP1]_L1_Light Chain

SEQ ID NO: 774 - protein, 453 aa, synthetic construct
  source 1..453: note = XENP44832 Chain 1- STEAP-A[STEAP1]_H1.29_IgG1_PVA_/S267K
QVQVQESGPGLVKPSQTLSLTCTVSGYSITSDYAWNWIRQPPGKKLEWIGYISNSGSTSYNPSLKSRVTISRDTSKNQFSLKLSSVTAADTAVYYCARERNYDYQAYYYAMDYWGQGTLVTVSSASTKGPSVFPLAPSSKSTSGGTAALGCLVKDYFPEPVTVSWNSGALTSGVHTFPAVLQSSGLYSLSSVVTVPSSSLGTQTYICNVNHKPSNTKVDKKVEPKSCDKTHTCPPCPAPPVAGPSVFLFPPKPKDTLMISRTPEVTCVVVDVKHEDPEVKFNWYVDGVEVHNAKTKPREEQYNSTYRVVSVLTVLHQDWLNGKEYKCKVSNKALPAPIEKTISKAKGQPREPQVYTLPPSREEMTKNQVSLTCLVKGFYPSDIAVEWESNGQPENNYKTTPPVLDSDGSFFLYSKLTVDKSRWQQGNVFSCSVMHEALHNHYTQKSLSLSPGK

SEQ ID NO: 775 - protein, 220 aa, synthetic construct; identical to SEQ ID NO: 484
  source 1..220: note = XENP44832 Chain 2- STEAP-A[STEAP1]_L1_Light Chain

SEQ ID NO: 776 - protein, 453 aa, synthetic construct
  source 1..453: note = XENP44833 Chain 1- STEAP-A[STEAP1]_H1.30_IgG1_PVA_/S267K
QVQVQESGPGLVKPSQTLSLTCTVSGYSITSDYAWNWIRQPPGKKLEWIGYISNSGSTSYNPSLKSRVTISRDTSKNQFSLKLSSVTAADTAVYYCARERNYDYQEYYYAMDYWGQGTLVTVSSASTKGPSVFPLAPSSKSTSGGTAALGCLVKDYFPEPVTVSWNSGALTSGVHTFPAVLQSSGLYSLSSVVTVPSSSLGTQTYICNVNHKPSNTKVDKKVEPKSCDKTHTCPPCPAPPVAGPSVFLFPPKPKDTLMISRTPEVTCVVVDVKHEDPEVKFNWYVDGVEVHNAKTKPREEQYNSTYRVVSVLTVLHQDWLNGKEYKCKVSNKALPAPIEKTISKAKGQPREPQVYTLPPSREEMTKNQVSLTCLVKGFYPSDIAVEWESNGQPENNYKTTPPVLDSDGSFFLYSKLTVDKSRWQQGNVFSCSVMHEALHNHYTQKSLSLSPGK

SEQ ID NO: 777 - protein, 220 aa, synthetic construct; identical to SEQ ID NO: 484
  source 1..220: note = XENP44833 Chain 2- STEAP-A[STEAP1]_L1_Light Chain

SEQ ID NO: 778 - protein, 453 aa, synthetic construct
  source 1..453: note = XENP44834 Chain 1- STEAP-A[STEAP1]_H1.31_IgG1_PVA_/S267K
QVQVQESGPGLVKPSQTLSLTCTVSGYSITSDYAWNWIRQPPGKKLEWIGYISNSGSTSYNPSLKSRVTISRDTSKNQFSLKLSSVTAADTAVYYCARERNYDYQLYYYAMDYWGQGTLVTVSSASTKGPSVFPLAPSSKSTSGGTAALGCLVKDYFPEPVTVSWNSGALTSGVHTFPAVLQSSGLYSLSSVVTVPSSSLGTQTYICNVNHKPSNTKVDKKVEPKSCDKTHTCPPCPAPPVAGPSVFLFPPKPKDTLMISRTPEVTCVVVDVKHEDPEVKFNWYVDGVEVHNAKTKPREEQYNSTYRVVSVLTVLHQDWLNGKEYKCKVSNKALPAPIEKTISKAKGQPREPQVYTLPPSREEMTKNQVSLTCLVKGFYPSDIAVEWESNGQPENNYKTTPPVLDSDGSFFLYSKLTVDKSRWQQGNVFSCSVMHEALHNHYTQKSLSLSPGK

SEQ ID NO: 779 - protein, 220 aa, synthetic construct; identical to SEQ ID NO: 484
  source 1..220: note = XENP44834 Chain 2- STEAP-A[STEAP1]_L1_Light Chain

SEQ ID NO: 780 - protein, 453 aa, synthetic construct
  source 1..453: note = XENP44835 Chain 1- STEAP-A[STEAP1]_H1.32_IgG1_PVA_/S267K
QVQVQESGPGLVKPSQTLSLTCTVSGYSITSDYAWNWIRQPPGKKLEWIGYISNSGSTSYNPSLKSRVTISRDTSKNQFSLKLSSVTAADTAVYYCARERNYDYQQYYYAMDYWGQGTLVTVSSASTKGPSVFPLAPSSKSTSGGTAALGCLVKDYFPEPVTVSWNSGALTSGVHTFPAVLQSSGLYSLSSVVTVPSSSLGTQTYICNVNHKPSNTKVDKKVEPKSCDKTHTCPPCPAPPVAGPSVFLFPPKPKDTLMISRTPEVTCVVVDVKHEDPEVKFNWYVDGVEVHNAKTKPREEQYNSTYRVVSVLTVLHQDWLNGKEYKCKVSNKALPAPIEKTISKAKGQPREPQVYTLPPSREEMTKNQVSLTCLVKGFYPSDIAVEWESNGQPENNYKTTPPVLDSDGSFFLYSKLTVDKSRWQQGNVFSCSVMHEALHNHYTQKSLSLSPGK

SEQ ID NO: 781 - protein, 220 aa, synthetic construct; identical to SEQ ID NO: 484
  source 1..220: note = XENP44835 Chain 2- STEAP-A[STEAP1]_L1_Light Chain

SEQ ID NO: 782 - protein, 453 aa, synthetic construct
  source 1..453: note = XENP44836 Chain 1- STEAP-A[STEAP1]_H1.33_IgG1_PVA_/S267K
QVQVQESGPGLVKPSQTLSLTCTVSGYSITSDYAWNWIRQPPGKKLEWIGYISNSGSTSYNPSLKSRVTISRDTSKNQFSLKLSSVTAADTAVYYCARERNYDYQTYYYAMDYWGQGTLVTVSSASTKGPSVFPLAPSSKSTSGGTAALGCLVKDYFPEPVTVSWNSGALTSGVHTFPAVLQSSGLYSLSSVVTVPSSSLGTQTYICNVNHKPSNTKVDKKVEPKSCDKTHTCPPCPAPPVAGPSVFLFPPKPKDTLMISRTPEVTCVVVDVKHEDPEVKFNWYVDGVEVHNAKTKPREEQYNSTYRVVSVLTVLHQDWLNGKEYKCKVSNKALPAPIEKTISKAKGQPREPQVYTLPPSREEMTKNQVSLTCLVKGFYPSDIAVEWESNGQPENNYKTTPPVLDSDGSFFLYSKLTVDKSRWQQGNVFSCSVMHEALHNHYTQKSLSLSPGK

SEQ ID NO: 783 - protein, 220 aa, synthetic construct; identical to SEQ ID NO: 484
  source 1..220: note = XENP44836 Chain 2- STEAP-A[STEAP1]_L1_Light Chain

SEQ ID NO: 784 - protein, 453 aa, synthetic construct
  source 1..453: note = XENP44837 Chain 1- STEAP-A[STEAP1]_H1.34_IgG1_PVA_/S267K
QVQVQESGPGLVKPSQTLSLTCTVSGYSITSDYAWNWIRQPPGKKLEWIGYISNSGSTSYNPSLKSRVTISRDTSKNQFSLKLSSVTAADTAVYYCARERNYDYTAYYYAMDYWGQGTLVTVSSASTKGPSVFPLAPSSKSTSGGTAALGCLVKDYFPEPVTVSWNSGALTSGVHTFPAVLQSSGLYSLSSVVTVPSSSLGTQTYICNVNHKPSNTKVDKKVEPKSCDKTHTCPPCPAPPVAGPSVFLFPPKPKDTLMISRTPEVTCVVVDVKHEDPEVKFNWYVDGVEVHNAKTKPREEQYNSTYRVVSVLTVLHQDWLNGKEYKCKVSNKALPAPIEKTISKAKGQPREPQVYTLPPSREEMTKNQVSLTCLVKGFYPSDIAVEWESNGQPENNYKTTPPVLDSDGSFFLYSKLTVDKSRWQQGNVFSCSVMHEALHNHYTQKSLSLSPGK

SEQ ID NO: 785 - protein, 220 aa, synthetic construct; identical to SEQ ID NO: 484
  source 1..220: note = XENP44837 Chain 2- STEAP-A[STEAP1]_L1_Light Chain

SEQ ID NO: 786 - protein, 453 aa, synthetic construct
  source 1..453: note = XENP44838 Chain 1- STEAP-A[STEAP1]_H1.35_IgG1_PVA_/S267K
QVQVQESGPGLVKPSQTLSLTCTVSGYSITSDYAWNWIRQPPGKKLEWIGYISNSGSTSYNPSLKSRVTISRDTSKNQFSLKLSSVTAADTAVYYCARERNYDYTEYYYAMDYWGQGTLVTVSSASTKGPSVFPLAPSSKSTSGGTAALGCLVKDYFPEPVTVSWNSGALTSGVHTFPAVLQSSGLYSLSSVVTVPSSSLGTQTYICNVNHKPSNTKVDKKVEPKSCDKTHTCPPCPAPPVAGPSVFLFPPKPKDTLMISRTPEVTCVVVDVKHEDPEVKFNWYVDGVEVHNAKTKPREEQYNSTYRVVSVLTVLHQDWLNGKEYKCKVSNKALPAPIEKTISKAKGQPREPQVYTLPPSREEMTKNQVSLTCLVKGFYPSDIAVEWESNGQPENNYKTTPPVLDSDGSFFLYSKLTVDKSRWQQGNVFSCSVMHEALHNHYTQKSLSLSPGK

SEQ ID NO: 787 - protein, 220 aa, synthetic construct; identical to SEQ ID NO: 484
  source 1..220: note = XENP44838 Chain 2- STEAP-A[STEAP1]_L1_Light Chain

SEQ ID NO: 788 - protein, 453 aa, synthetic construct
  source 1..453: note = XENP44839 Chain 1- STEAP-A[STEAP1]_H1.36_IgG1_PVA_/S267K
QVQVQESGPGLVKPSQTLSLTCTVSGYSITSDYAWNWIRQPPGKKLEWIGYISNSGSTSYNPSLKSRVTISRDTSKNQFSLKLSSVTAADTAVYYCARERNYDYTLYYYAMDYWGQGTLVTVSSASTKGPSVFPLAPSSKSTSGGTAALGCLVKDYFPEPVTVSWNSGALTSGVHTFPAVLQSSGLYSLSSVVTVPSSSLGTQTYICNVNHKPSNTKVDKKVEPKSCDKTHTCPPCPAPPVAGPSVFLFPPKPKDTLMISRTPEVTCVVVDVKHEDPEVKFNWYVDGVEVHNAKTKPREEQYNSTYRVVSVLTVLHQDWLNGKEYKCKVSNKALPAPIEKTISKAKGQPREPQVYTLPPSREEMTKNQVSLTCLVKGFYPSDIAVEWESNGQPENNYKTTPPVLDSDGSFFLYSKLTVDKSRWQQGNVFSCSVMHEALHNHYTQKSLSLSPGK

SEQ ID NO: 789 - protein, 220 aa, synthetic construct; identical to SEQ ID NO: 484
  source 1..220: note = XENP44839 Chain 2- STEAP-A[STEAP1]_L1_Light Chain

SEQ ID NO: 790 - protein, 453 aa, synthetic construct
  source 1..453: note = XENP44840 Chain 1- STEAP-A[STEAP1]_H1.37_IgG1_PVA_/S267K
QVQVQESGPGLVKPSQTLSLTCTVSGYSITSDYAWNWIRQPPGKKLEWIGYISNSGSTSYNPSLKSRVTISRDTSKNQFSLKLSSVTAADTAVYYCARERNYDYTQYYYAMDYWGQGTLVTVSSASTKGPSVFPLAPSSKSTSGGTAALGCLVKDYFPEPVTVSWNSGALTSGVHTFPAVLQSSGLYSLSSVVTVPSSSLGTQTYICNVNHKPSNTKVDKKVEPKSCDKTHTCPPCPAPPVAGPSVFLFPPKPKDTLMISRTPEVTCVVVDVKHEDPEVKFNWYVDGVEVHNAKTKPREEQYNSTYRVVSVLTVLHQDWLNGKEYKCKVSNKALPAPIEKTISKAKGQPREPQVYTLPPSREEMTKNQVSLTCLVKGFYPSDIAVEWESNGQPENNYKTTPPVLDSDGSFFLYSKLTVDKSRWQQGNVFSCSVMHEALHNHYTQKSLSLSPGK

SEQ ID NO: 791 - protein, 220 aa, synthetic construct; identical to SEQ ID NO: 484
  source 1..220: note = XENP44840 Chain 2- STEAP-A[STEAP1]_L1_Light Chain

SEQ ID NO: 792 - protein, 453 aa, synthetic construct
  source 1..453: note = XENP44841 Chain 1- STEAP-A[STEAP1]_H1.38_IgG1_PVA_/S267K
QVQVQESGPGLVKPSQTLSLTCTVSGYSITSDYAWNWIRQPPGKKLEWIGYISNSGSTSYNPSLKSRVTISRDTSKNQFSLKLSSVTAADTAVYYCARERNYDYTTYYYAMDYWGQGTLVTVSSASTKGPSVFPLAPSSKSTSGGTAALGCLVKDYFPEPVTVSWNSGALTSGVHTFPAVLQSSGLYSLSSVVTVPSSSLGTQTYICNVNHKPSNTKVDKKVEPKSCDKTHTCPPCPAPPVAGPSVFLFPPKPKDTLMISRTPEVTCVVVDVKHEDPEVKFNWYVDGVEVHNAKTKPREEQYNSTYRVVSVLTVLHQDWLNGKEYKCKVSNKALPAPIEKTISKAKGQPREPQVYTLPPSREEMTKNQVSLTCLVKGFYPSDIAVEWESNGQPENNYKTTPPVLDSDGSFFLYSKLTVDKSRWQQGNVFSCSVMHEALHNHYTQKSLSLSPGK

SEQ ID NO: 793 - protein, 220 aa, synthetic construct; identical to SEQ ID NO: 484
  source 1..220: note = XENP44841 Chain 2- STEAP-A[STEAP1]_L1_Light Chain

SEQ ID NO: 794 - protein, 453 aa, synthetic construct; identical to SEQ ID NO: 716
  source 1..453: note = XENP44842 Chain 1- STEAP-A[STEAP1]_H1__IgG1_PVA_/S267K

SEQ ID NO: 795 - protein, 220 aa, synthetic construct
  source 1..220: note = XENP44842 Chain 2- STEAP-A[STEAP1]_L1.1_Light Chain
DIVMTQSPDSLAVSLGERATINCKSSQSLLYRSNQKNYLAWYQQKPGQPPKLLIYWASTRESGVPDRFTGSGSGTDFTLTISSLQAEDVAVYYCQQYYNYPRTFGGGTKVEIKRTVAAPSVFIFPPSDEQLKSGTASVVCLLNNFYPREAKVQWKVDNALQSGNSQESVTEQDSKDSTYSLSSTLTLSKADYEKHKVYACEVTHQGLSSPVTKSFNRGEC

SEQ ID NO: 796 - protein, 453 aa, synthetic construct; identical to SEQ ID NO: 716
  source 1..453: note = XENP44843 Chain 1- STEAP-A[STEAP1]_H1_IgG1_PVA_/S267K

SEQ ID NO: 797 - protein, 220 aa, synthetic construct
  source 1..220: note = XENP44843 Chain 2- STEAP-A[STEAP1]_L1.2_Light Chain
DIVMTQSPDSLAVSLGERATINCKSSQSLLYRSNQKNYLAWYQQKPGQSPKLLIYWASTRESGVPDRFSGSGSGTDFTLTISSLQAEDVAVYYCQQYYNYPRTFGGGTKVEIKRTVAAPSVFIFPPSDEQLKSGTASVVCLLNNFYPREAKVQWKVDNALQSGNSQESVTEQDSKDSTYSLSSTLTLSKADYEKHKVYACEVTHQGLSSPVTKSFNRGEC

SEQ ID NO: 798 - protein, 453 aa, synthetic construct; identical to SEQ ID NO: 716
  source 1..453: note = XENP44844 Chain 1- STEAP-A[STEAP1]_H1_IgG1_PVA_/S267K

SEQ ID NO: 799 - protein, 220 aa, synthetic construct
  source 1..220: note = XENP44844 Chain 2- STEAP-A[STEAP1]_L1.3_Light Chain
DIVMTQSPDSLAVSLGERATINCKSSQSLLYRSNQKNYLAWYQQKPGQPPKLLIYWASTRESGVPDRFSGSGSGTDFTLTISSLQAEDVAVYYCQQYYNYPRTFGGGTKVEIKRTVAAPSVFIFPPSDEQLKSGTASVVCLLNNFYPREAKVQWKVDNALQSGNSQESVTEQDSKDSTYSLSSTLTLSKADYEKHKVYACEVTHQGLSSPVTKSFNRGEC

SEQ ID NO: 800 - protein, 453 aa, synthetic construct
  source 1..453: note = XENP45529 Chain 1- STEAP-A[STEAP1]_H0_IgG1_PVA_/S267K
DVQVQESGPGLVKPSQSLSLTCTVTGYSITSDYAWNWIRQFPGNKLEWMGYISNSGSTSYNPSLKSRISITRDTSKNQFFLQLISVTTEDTATYYCARERNYDYDDYYYAMDYWGQGTTLTVSAASTKGPSVFPLAPSSKSTSGGTAALGCLVKDYFPEPVTVSWNSGALTSGVHTFPAVLQSSGLYSLSSVVTVPSSSLGTQTYICNVNHKPSNTKVDKKVEPKSCDKTHTCPPCPAPPVAGPSVFLFPPKPKDTLMISRTPEVTCVVVDVKHEDPEVKFNWYVDGVEVHNAKTKPREEQYNSTYRVVSVLTVLHQDWLNGKEYKCKVSNKALPAPIEKTISKAKGQPREPQVYTLPPSREEMTKNQVSLTCLVKGFYPSDIAVEWESNGQPENNYKTTPPVLDSDGSFFLYSKLTVDKSRWQQGNVFSCSVMHEALHNHYTQKSLSLSPGK

SEQ ID NO: 801 - protein, 220 aa, synthetic construct; identical to SEQ ID NO: 481
  source 1..220: note = XENP45529 Chain 2- STEAP-A[STEAP1]_L0_Light Chain

SEQ ID NO: 802 - protein, 453 aa, synthetic construct; identical to SEQ ID NO: 758
  source 1..453: note = XENP45530 Chain 1- STEAP-A[STEAP1]_H1.21_IgG1_PVA_/S267K

SEQ ID NO: 803 - protein, 220 aa, synthetic construct; identical to SEQ ID NO: 799
  source 1..220: note = XENP45530 Chain 2- STEAP-A[STEAP1]_L1.3_Light Chain

SEQ ID NO: 804 - protein, 453 aa, synthetic construct; identical to SEQ ID NO: 784
  source 1..453: note = XENP45531 Chain 1- STEAP-A[STEAP1]_H1.34_IgG1_PVA_/S267K

SEQ ID NO: 805 - protein, 220 aa, synthetic construct; identical to SEQ ID NO: 799
  source 1..220: note = XENP45531 Chain 2- STEAP-A[STEAP1]_L1.3_Light Chain

SEQ ID NO: 806 - protein, 453 aa, synthetic construct
  source 1..453: note = XENP45632 Chain 1- STEAP-A[STEAP1]_H1.39_IgG1_PVA_/S267K
QVQVQESGPGLVKPSQTLSLTCTVSGYSITSEYAWNWIRQPPGKKLEWIGYISNSGSTSYNPSLKSRVTISRDTSKNQFSLKLSSVTAADTAVYYCARERNYDYDDYYYAMDYWGQGTLVTVSSASTKGPSVFPLAPSSKSTSGGTAALGCLVKDYFPEPVTVSWNSGALTSGVHTFPAVLQSSGLYSLSSVVTVPSSSLGTQTYICNVNHKPSNTKVDKKVEPKSCDKTHTCPPCPAPPVAGPSVFLFPPKPKDTLMISRTPEVTCVVVDVKHEDPEVKFNWYVDGVEVHNAKTKPREEQYNSTYRVVSVLTVLHQDWLNGKEYKCKVSNKALPAPIEKTISKAKGQPREPQVYTLPPSREEMTKNQVSLTCLVKGFYPSDIAVEWESNGQPENNYKTTPPVLDSDGSFFLYSKLTVDKSRWQQGNVFSCSVMHEALHNHYTQKSLSLSPGK

SEQ ID NO: 807 - protein, 220 aa, synthetic construct; identical to SEQ ID NO: 484
  source 1..220: note = XENP45632 Chain 2- STEAP-A[STEAP1]_L1_Light Chain

SEQ ID NO: 808 - protein, 453 aa, synthetic construct
  source 1..453: note = XENP45633 Chain 1- STEAP-A[STEAP1]_H1.40_IgG1_PVA_/S267K
QVQVQESGPGLVKPSQTLSLTCTVSGYSITSNYAWNWIRQPPGKKLEWIGYISNSGSTSYNPSLKSRVTISRDTSKNQFSLKLSSVTAADTAVYYCARERNYDYDDYYYAMDYWGQGTLVTVSSASTKGPSVFPLAPSSKSTSGGTAALGCLVKDYFPEPVTVSWNSGALTSGVHTFPAVLQSSGLYSLSSVVTVPSSSLGTQTYICNVNHKPSNTKVDKKVEPKSCDKTHTCPPCPAPPVAGPSVFLFPPKPKDTLMISRTPEVTCVVVDVKHEDPEVKFNWYVDGVEVHNAKTKPREEQYNSTYRVVSVLTVLHQDWLNGKEYKCKVSNKALPAPIEKTISKAKGQPREPQVYTLPPSREEMTKNQVSLTCLVKGFYPSDIAVEWESNGQPENNYKTTPPVLDSDGSFFLYSKLTVDKSRWQQGNVFSCSVMHEALHNHYTQKSLSLSPGK

SEQ ID NO: 809 - protein, 220 aa, synthetic construct; identical to SEQ ID NO: 484
  source 1..220: note = XENP45633 Chain 2- STEAP-A[STEAP1]_L1_Light Chain

SEQ ID NO: 810 - protein, 453 aa, synthetic construct
  source 1..453: note = XENP45634 Chain 1- STEAP-A[STEAP1]_H1.41_IgG1_PVA_/S267K
QVQVQESGPGLVKPSQTLSLTCTVSGYSITSRYAWNWIRQPPGKKLEWIGYISNSGSTSYNPSLKSRVTISRDTSKNQFSLKLSSVTAADTAVYYCARERNYDYDDYYYAMDYWGQGTLVTVSSASTKGPSVFPLAPSSKSTSGGTAALGCLVKDYFPEPVTVSWNSGALTSGVHTFPAVLQSSGLYSLSSVVTVPSSSLGTQTYICNVNHKPSNTKVDKKVEPKSCDKTHTCPPCPAPPVAGPSVFLFPPKPKDTLMISRTPEVTCVVVDVKHEDPEVKFNWYVDGVEVHNAKTKPREEQYNSTYRVVSVLTVLHQDWLNGKEYKCKVSNKALPAPIEKTISKAKGQPREPQVYTLPPSREEMTKNQVSLTCLVKGFYPSDIAVEWESNGQPENNYKTTPPVLDSDGSFFLYSKLTVDKSRWQQGNVFSCSVMHEALHNHYTQKSLSLSPGK

SEQ ID NO: 811 - protein, 220 aa, synthetic construct; identical to SEQ ID NO: 484
  source 1..220: note = XENP45634 Chain 2- STEAP-A[STEAP1]_L1_Light Chain

SEQ ID NO: 812 - protein, 453 aa, synthetic construct
  source 1..453: note = XENP45635 Chain 1- STEAP-A[STEAP1]_H1.42_IgG1_PVA_/S267K
QVQVQESGPGLVKPSQTLSLTCTVSGYSITSTYAWNWIRQPPGKKLEWIGYISNSGSTSYNPSLKSRVTISRDTSKNQFSLKLSSVTAADTAVYYCARERNYDYDDYYYAMDYWGQGTLVTVSSASTKGPSVFPLAPSSKSTSGGTAALGCLVKDYFPEPVTVSWNSGALTSGVHTFPAVLQSSGLYSLSSVVTVPSSSLGTQTYICNVNHKPSNTKVDKKVEPKSCDKTHTCPPCPAPPVAGPSVFLFPPKPKDTLMISRTPEVTCVVVDVKHEDPEVKFNWYVDGVEVHNAKTKPREEQYNSTYRVVSVLTVLHQDWLNGKEYKCKVSNKALPAPIEKTISKAKGQPREPQVYTLPPSREEMTKNQVSLTCLVKGFYPSDIAVEWESNGQPENNYKTTPPVLDSDGSFFLYSKLTVDKSRWQQGNVFSCSVMHEALHNHYTQKSLSLSPGK

SEQ ID NO: 813 - protein, 220 aa, synthetic construct; identical to SEQ ID NO: 484
  source 1..220: note = XENP45635 Chain 2- STEAP-A[STEAP1]_L1_Light Chain

SEQ ID NO: 814 - protein, 453 aa, synthetic construct
  source 1..453: note = XENP45636 Chain 1- STEAP-A[STEAP1]_H1.43_IgG1_PVA_/S267K
QVQVQESGPGLVKPSQTLSLTCTVSGYSITSYYAWNWIRQPPGKKLEWIGYISNSGSTSYNPSLKSRVTISRDTSKNQFSLKLSSVTAADTAVYYCARERNYDYDDYYYAMDYWGQGTLVTVSSASTKGPSVFPLAPSSKSTSGGTAALGCLVKDYFPEPVTVSWNSGALTSGVHTFPAVLQSSGLYSLSSVVTVPSSSLGTQTYICNVNHKPSNTKVDKKVEPKSCDKTHTCPPCPAPPVAGPSVFLFPPKPKDTLMISRTPEVTCVVVDVKHEDPEVKFNWYVDGVEVHNAKTKPREEQYNSTYRVVSVLTVLHQDWLNGKEYKCKVSNKALPAPIEKTISKAKGQPREPQVYTLPPSREEMTKNQVSLTCLVKGFYPSDIAVEWESNGQPENNYKTTPPVLDSDGSFFLYSKLTVDKSRWQQGNVFSCSVMHEALHNHYTQKSLSLSPGK

SEQ ID NO: 815 - protein, 220 aa, synthetic construct; identical to SEQ ID NO: 484
  source 1..220: note = XENP45636 Chain 2- STEAP-A[STEAP1]_L1_Light Chain

SEQ ID NO: 816 - protein, 453 aa, synthetic construct
  source 1..453: note = XENP45637 Chain 1- STEAP-A[STEAP1]_H1.44_IgG1_PVA_/S267K
QVQVQESGPGLVKPSQTLSLTCTVSGYSITSDAAWNWIRQPPGKKLEWIGYISNSGSTSYNPSLKSRVTISRDTSKNQFSLKLSSVTAADTAVYYCARERNYDYDDYYYAMDYWGQGTLVTVSSASTKGPSVFPLAPSSKSTSGGTAALGCLVKDYFPEPVTVSWNSGALTSGVHTFPAVLQSSGLYSLSSVVTVPSSSLGTQTYICNVNHKPSNTKVDKKVEPKSCDKTHTCPPCPAPPVAGPSVFLFPPKPKDTLMISRTPEVTCVVVDVKHEDPEVKFNWYVDGVEVHNAKTKPREEQYNSTYRVVSVLTVLHQDWLNGKEYKCKVSNKALPAPIEKTISKAKGQPREPQVYTLPPSREEMTKNQVSLTCLVKGFYPSDIAVEWESNGQPENNYKTTPPVLDSDGSFFLYSKLTVDKSRWQQGNVFSCSVMHEALHNHYTQKSLSLSPGK

SEQ ID NO: 817 - protein, 220 aa, synthetic construct; identical to SEQ ID NO: 484
  source 1..220: note = XENP45637 Chain 2- STEAP-A[STEAP1]_L1_Light Chain

SEQ ID NO: 818 - protein, 453 aa, synthetic construct
  source 1..453: note = XENP45638 Chain 1- STEAP-A[STEAP1]_H1.45_IgG1_PVA_/S267K
QVQVQESGPGLVKPSQTLSLTCTVSGYSITSDDAWNWIRQPPGKKLEWIGYISNSGSTSYNPSLKSRVTISRDTSKNQFSLKLSSVTAADTAVYYCARERNYDYDDYYYAMDYWGQGTLVTVSSASTKGPSVFPLAPSSKSTSGGTAALGCLVKDYFPEPVTVSWNSGALTSGVHTFPAVLQSSGLYSLSSVVTVPSSSLGTQTYICNVNHKPSNTKVDKKVEPKSCDKTHTCPPCPAPPVAGPSVFLFPPKPKDTLMISRTPEVTCVVVDVKHEDPEVKFNWYVDGVEVHNAKTKPREEQYNSTYRVVSVLTVLHQDWLNGKEYKCKVSNKALPAPIEKTISKAKGQPREPQVYTLPPSREEMTKNQVSLTCLVKGFYPSDIAVEWESNGQPENNYKTTPPVLDSDGSFFLYSKLTVDKSRWQQGNVFSCSVMHEALHNHYTQKSLSLSPGK

SEQ ID NO: 819 - protein, 220 aa, synthetic construct; identical to SEQ ID NO: 484
  source 1..220: note = XENP45638 Chain 2- STEAP-A[STEAP1]_L1_Light Chain

SEQ ID NO: 820 - protein, 453 aa, synthetic construct
  source 1..453: note = XENP45639 Chain 1- STEAP-A[STEAP1]_H1.46_IgG1_PVA_/S267K
QVQVQESGPGLVKPSQTLSLTCTVSGYSITSDKAWNWIRQPPGKKLEWIGYISNSGSTSYNPSLKSRVTISRDTSKNQFSLKLSSVTAADTAVYYCARERNYDYDDYYYAMDYWGQGTLVTVSSASTKGPSVFPLAPSSKSTSGGTAALGCLVKDYFPEPVTVSWNSGALTSGVHTFPAVLQSSGLYSLSSVVTVPSSSLGTQTYICNVNHKPSNTKVDKKVEPKSCDKTHTCPPCPAPPVAGPSVFLFPPKPKDTLMISRTPEVTCVVVDVKHEDPEVKFNWYVDGVEVHNAKTKPREEQYNSTYRVVSVLTVLHQDWLNGKEYKCKVSNKALPAPIEKTISKAKGQPREPQVYTLPPSREEMTKNQVSLTCLVKGFYPSDIAVEWESNGQPENNYKTTPPVLDSDGSFFLYSKLTVDKSRWQQGNVFSCSVMHEALHNHYTQKSLSLSPGK

SEQ ID NO: 821 - protein, 220 aa, synthetic construct; identical to SEQ ID NO: 484
  source 1..220: note = XENP45639 Chain 2- STEAP-A[STEAP1]_L1_Light Chain

SEQ ID NO: 822 - protein, 453 aa, synthetic construct
  source 1..453: note = XENP45640 Chain 1- STEAP-A[STEAP1]_H1.47_IgG1_PVA_/S267K
QVQVQESGPGLVKPSQTLSLTCTVSGYSITSDLAWNWIRQPPGKKLEWIGYISNSGSTSYNPSLKSRVTISRDTSKNQFSLKLSSVTAADTAVYYCARERNYDYDDYYYAMDYWGQGTLVTVSSASTKGPSVFPLAPSSKSTSGGTAALGCLVKDYFPEPVTVSWNSGALTSGVHTFPAVLQSSGLYSLSSVVTVPSSSLGTQTYICNVNHKPSNTKVDKKVEPKSCDKTHTCPPCPAPPVAGPSVFLFPPKPKDTLMISRTPEVTCVVVDVKHEDPEVKFNWYVDGVEVHNAKTKPREEQYNSTYRVVSVLTVLHQDWLNGKEYKCKVSNKALPAPIEKTISKAKGQPREPQVYTLPPSREEMTKNQVSLTCLVKGFYPSDIAVEWESNGQPENNYKTTPPVLDSDGSFFLYSKLTVDKSRWQQGNVFSCSVMHEALHNHYTQKSLSLSPGK

SEQ ID NO: 823 - protein, 220 aa, synthetic construct; identical to SEQ ID NO: 484
  source 1..220: note = XENP45640 Chain 2- STEAP-A[STEAP1]_L1_Light Chain

SEQ ID NO: 824 - protein, 453 aa, synthetic construct
  source 1..453: note = XENP45641 Chain 1- STEAP-A[STEAP1]_H1.48_IgG1_PVA_/S267K
QVQVQESGPGLVKPSQTLSLTCTVSGYSITSDQAWNWIRQPPGKKLEWIGYISNSGSTSYNPSLKSRVTISRDTSKNQFSLKLSSVTAADTAVYYCARERNYDYDDYYYAMDYWGQGTLVTVSSASTKGPSVFPLAPSSKSTSGGTAALGCLVKDYFPEPVTVSWNSGALTSGVHTFPAVLQSSGLYSLSSVVTVPSSSLGTQTYICNVNHKPSNTKVDKKVEPKSCDKTHTCPPCPAPPVAGPSVFLFPPKPKDTLMISRTPEVTCVVVDVKHEDPEVKFNWYVDGVEVHNAKTKPREEQYNSTYRVVSVLTVLHQDWLNGKEYKCKVSNKALPAPIEKTISKAKGQPREPQVYTLPPSREEMTKNQVSLTCLVKGFYPSDIAVEWESNGQPENNYKTTPPVLDSDGSFFLYSKLTVDKSRWQQGNVFSCSVMHEALHNHYTQKSLSLSPGK

SEQ ID NO: 825 - protein, 220 aa, synthetic construct; identical to SEQ ID NO: 484
  source 1..220: note = XENP45641 Chain 2- STEAP-A[STEAP1]_L1_Light Chain

SEQ ID NO: 826 - protein, 453 aa, synthetic construct
  source 1..453: note = XENP45642 Chain 1- STEAP-A[STEAP1]_H1.49_IgG1_PVA_/S267K
QVQVQESGPGLVKPSQTLSLTCTVSGYSITSDYDWNWIRQPPGKKLEWIGYISNSGSTSYNPSLKSRVTISRDTSKNQFSLKLSSVTAADTAVYYCARERNYDYDDYYYAMDYWGQGTLVTVSSASTKGPSVFPLAPSSKSTSGGTAALGCLVKDYFPEPVTVSWNSGALTSGVHTFPAVLQSSGLYSLSSVVTVPSSSLGTQTYICNVNHKPSNTKVDKKVEPKSCDKTHTCPPCPAPPVAGPSVFLFPPKPKDTLMISRTPEVTCVVVDVKHEDPEVKFNWYVDGVEVHNAKTKPREEQYNSTYRVVSVLTVLHQDWLNGKEYKCKVSNKALPAPIEKTISKAKGQPREPQVYTLPPSREEMTKNQVSLTCLVKGFYPSDIAVEWESNGQPENNYKTTPPVLDSDGSFFLYSKLTVDKSRWQQGNVFSCSVMHEALHNHYTQKSLSLSPGK

SEQ ID NO: 827 - protein, 220 aa, synthetic construct; identical to SEQ ID NO: 484
  source 1..220: note = XENP45642 Chain 2- STEAP-A[STEAP1]_L1_Light Chain

SEQ ID NO: 828 - protein, 453 aa, synthetic construct
  source 1..453: note = XENP45643 Chain 1- STEAP-A[STEAP1]_H1.50_IgG1_PVA_/S267K
QVQVQESGPGLVKPSQTLSLTCTVSGYSITSDYFWNWIRQPPGKKLEWIGYISNSGSTSYNPSLKSRVTISRDTSKNQFSLKLSSVTAADTAVYYCARERNYDYDDYYYAMDYWGQGTLVTVSSASTKGPSVFPLAPSSKSTSGGTAALGCLVKDYFPEPVTVSWNSGALTSGVHTFPAVLQSSGLYSLSSVVTVPSSSLGTQTYICNVNHKPSNTKVDKKVEPKSCDKTHTCPPCPAPPVAGPSVFLFPPKPKDTLMISRTPEVTCVVVDVKHEDPEVKFNWYVDGVEVHNAKTKPREEQYNSTYRVVSVLTVLHQDWLNGKEYKCKVSNKALPAPIEKTISKAKGQPREPQVYTLPPSREEMTKNQVSLTCLVKGFYPSDIAVEWESNGQPENNYKTTPPVLDSDGSFFLYSKLTVDKSRWQQGNVFSCSVMHEALHNHYTQKSLSLSPGK

SEQ ID NO: 829 - protein, 220 aa, synthetic construct; identical to SEQ ID NO: 484
  source 1..220: note = XENP45643 Chain 2- STEAP-A[STEAP1]_L1_Light Chain

SEQ ID NO: 830 - protein, 453 aa, synthetic construct
  source 1..453: note = XENP45644 Chain 1- STEAP-A[STEAP1]_H1.51_IgG1_PVA_/S267K
QVQVQESGPGLVKPSQTLSLTCTVSGYSITSDYGWNWIRQPPGKKLEWIGYISNSGSTSYNPSLKSRVTISRDTSKNQFSLKLSSVTAADTAVYYCARERNYDYDDYYYAMDYWGQGTLVTVSSASTKGPSVFPLAPSSKSTSGGTAALGCLVKDYFPEPVTVSWNSGALTSGVHTFPAVLQSSGLYSLSSVVTVPSSSLGTQTYICNVNHKPSNTKVDKKVEPKSCDKTHTCPPCPAPPVAGPSVFLFPPKPKDTLMISRTPEVTCVVVDVKHEDPEVKFNWYVDGVEVHNAKTKPREEQYNSTYRVVSVLTVLHQDWLNGKEYKCKVSNKALPAPIEKTISKAKGQPREPQVYTLPPSREEMTKNQVSLTCLVKGFYPSDIAVEWESNGQPENNYKTTPPVLDSDGSFFLYSKLTVDKSRWQQGNVFSCSVMHEALHNHYTQKSLSLSPGK

SEQ ID NO: 831 - protein, 220 aa, synthetic construct; identical to SEQ ID NO: 484
  source 1..220: note = XENP45644 Chain 2- STEAP-A[STEAP1]_L1_Light Chain

SEQ ID NO: 832 - protein, 453 aa, synthetic construct
  source 1..453: note = XENP45645 Chain 1- STEAP-A[STEAP1]_H1.52_IgG1_PVA_/S267K
QVQVQESGPGLVKPSQTLSLTCTVSGYSITSDYHWNWIRQPPGKKLEWIGYISNSGSTSYNPSLKSRVTISRDTSKNQFSLKLSSVTAADTAVYYCARERNYDYDDYYYAMDYWGQGTLVTVSSASTKGPSVFPLAPSSKSTSGGTAALGCLVKDYFPEPVTVSWNSGALTSGVHTFPAVLQSSGLYSLSSVVTVPSSSLGTQTYICNVNHKPSNTKVDKKVEPKSCDKTHTCPPCPAPPVAGPSVFLFPPKPKDTLMISRTPEVTCVVVDVKHEDPEVKFNWYVDGVEVHNAKTKPREEQYNSTYRVVSVLTVLHQDWLNGKEYKCKVSNKALPAPIEKTISKAKGQPREPQVYTLPPSREEMTKNQVSLTCLVKGFYPSDIAVEWESNGQPENNYKTTPPVLDSDGSFFLYSKLTVDKSRWQQGNVFSCSVMHEALHNHYTQKSLSLSPGK

SEQ ID NO: 833 - protein, 220 aa, synthetic construct; identical to SEQ ID NO: 484
  source 1..220: note = XENP45645 Chain 2- STEAP-A[STEAP1]_L1_Light Chain

SEQ ID NO: 834 - protein, 453 aa, synthetic construct
  source 1..453: note = XENP45646 Chain 1- STEAP-A[STEAP1]_H1.53_IgG1_PVA_/S267K
QVQVQESGPGLVKPSQTLSLTCTVSGYSITSDYKWNWIRQPPGKKLEWIGYISNSGSTSYNPSLKSRVTISRDTSKNQFSLKLSSVTAADTAVYYCARERNYDYDDYYYAMDYWGQGTLVTVSSASTKGPSVFPLAPSSKSTSGGTAALGCLVKDYFPEPVTVSWNSGALTSGVHTFPAVLQSSGLYSLSSVVTVPSSSLGTQTYICNVNHKPSNTKVDKKVEPKSCDKTHTCPPCPAPPVAGPSVFLFPPKPKDTLMISRTPEVTCVVVDVKHEDPEVKFNWYVDGVEVHNAKTKPREEQYNSTYRVVSVLTVLHQDWLNGKEYKCKVSNKALPAPIEKTISKAKGQPREPQVYTLPPSREEMTKNQVSLTCLVKGFYPSDIAVEWESNGQPENNYKTTPPVLDSDGSFFLYSKLTVDKSRWQQGNVFSCSVMHEALHNHYTQKSLSLSPGK

SEQ ID NO: 835 - protein, 220 aa, synthetic construct; identical to SEQ ID NO: 484
  source 1..220: note = XENP45646 Chain 2- STEAP-A[STEAP1]_L1_Light Chain

SEQ ID NO: 836 - protein, 453 aa, synthetic construct
  source 1..453: note = XENP45647 Chain 1- STEAP-A[STEAP1]_H1.54_IgG1_PVA_/S267K
QVQVQESGPGLVKPSQTLSLTCTVSGYSITSDYLWNWIRQPPGKKLEWIGYISNSGSTSYNPSLKSRVTISRDTSKNQFSLKLSSVTAADTAVYYCARERNYDYDDYYYAMDYWGQGTLVTVSSASTKGPSVFPLAPSSKSTSGGTAALGCLVKDYFPEPVTVSWNSGALTSGVHTFPAVLQSSGLYSLSSVVTVPSSSLGTQTYICNVNHKPSNTKVDKKVEPKSCDKTHTCPPCPAPPVAGPSVFLFPPKPKDTLMISRTPEVTCVVVDVKHEDPEVKFNWYVDGVEVHNAKTKPREEQYNSTYRVVSVLTVLHQDWLNGKEYKCKVSNKALPAPIEKTISKAKGQPREPQVYTLPPSREEMTKNQVSLTCLVKGFYPSDIAVEWESNGQPENNYKTTPPVLDSDGSFFLYSKLTVDKSRWQQGNVFSCSVMHEALHNHYTQKSLSLSPGK

SEQ ID NO: 837 - protein, 220 aa, synthetic construct; identical to SEQ ID NO: 484
  source 1..220: note = XENP45647 Chain 2- STEAP-A[STEAP1]_L1_Light Chain

SEQ ID NO: 838 - protein, 453 aa, synthetic construct
  source 1..453: note = XENP45648 Chain 1- STEAP-A[STEAP1]_H1.55_IgG1_PVA_/S267K
QVQVQESGPGLVKPSQTLSLTCTVSGYSITSDYQWNWIRQPPGKKLEWIGYISNSGSTSYNPSLKSRVTISRDTSKNQFSLKLSSVTAADTAVYYCARERNYDYDDYYYAMDYWGQGTLVTVSSASTKGPSVFPLAPSSKSTSGGTAALGCLVKDYFPEPVTVSWNSGALTSGVHTFPAVLQSSGLYSLSSVVTVPSSSLGTQTYICNVNHKPSNTKVDKKVEPKSCDKTHTCPPCPAPPVAGPSVFLFPPKPKDTLMISRTPEVTCVVVDVKHEDPEVKFNWYVDGVEVHNAKTKPREEQYNSTYRVVSVLTVLHQDWLNGKEYKCKVSNKALPAPIEKTISKAKGQPREPQVYTLPPSREEMTKNQVSLTCLVKGFYPSDIAVEWESNGQPENNYKTTPPVLDSDGSFFLYSKLTVDKSRWQQGNVFSCSVMHEALHNHYTQKSLSLSPGK

SEQ ID NO: 839 - protein, 220 aa, synthetic construct; identical to SEQ ID NO: 484
  source 1..220: note = XENP45648 Chain 2- STEAP-A[STEAP1]_L1_Light Chain

SEQ ID NO: 840 - protein, 453 aa, synthetic construct
  source 1..453: note = XENP45649 Chain 1- STEAP-A[STEAP1]_H1.56_IgG1_PVA_/S267K
QVQVQESGPGLVKPSQTLSLTCTVSGYSITSDYSWNWIRQPPGKKLEWIGYISNSGSTSYNPSLKSRVTISRDTSKNQFSLKLSSVTAADTAVYYCARERNYDYDDYYYAMDYWGQGTLVTVSSASTKGPSVFPLAPSSKSTSGGTAALGCLVKDYFPEPVTVSWNSGALTSGVHTFPAVLQSSGLYSLSSVVTVPSSSLGTQTYICNVNHKPSNTKVDKKVEPKSCDKTHTCPPCPAPPVAGPSVFLFPPKPKDTLMISRTPEVTCVVVDVKHEDPEVKFNWYVDGVEVHNAKTKPREEQYNSTYRVVSVLTVLHQDWLNGKEYKCKVSNKALPAPIEKTISKAKGQPREPQVYTLPPSREEMTKNQVSLTCLVKGFYPSDIAVEWESNGQPENNYKTTPPVLDSDGSFFLYSKLTVDKSRWQQGNVFSCSVMHEALHNHYTQKSLSLSPGK

SEQ ID NO: 841 - protein, 220 aa, synthetic construct; identical to SEQ ID NO: 484
  source 1..220: note = XENP45649 Chain 2- STEAP-A[STEAP1]_L1_Light Chain

SEQ ID NO: 842 - protein, 453 aa, synthetic construct
  source 1..453: note = XENP45650 Chain 1- STEAP-A[STEAP1]_H1.57_IgG1_PVA_/S267K
QVQVQESGPGLVKPSQTLSLTCTVSGYSITSDYTWNWIRQPPGKKLEWIGYISNSGSTSYNPSLKSRVTISRDTSKNQFSLKLSSVTAADTAVYYCARERNYDYDDYYYAMDYWGQGTLVTVSSASTKGPSVFPLAPSSKSTSGGTAALGCLVKDYFPEPVTVSWNSGALTSGVHTFPAVLQSSGLYSLSSVVTVPSSSLGTQTYICNVNHKPSNTKVDKKVEPKSCDKTHTCPPCPAPPVAGPSVFLFPPKPKDTLMISRTPEVTCVVVDVKHEDPEVKFNWYVDGVEVHNAKTKPREEQYNSTYRVVSVLTVLHQDWLNGKEYKCKVSNKALPAPIEKTISKAKGQPREPQVYTLPPSREEMTKNQVSLTCLVKGFYPSDIAVEWESNGQPENNYKTTPPVLDSDGSFFLYSKLTVDKSRWQQGNVFSCSVMHEALHNHYTQKSLSLSPGK

SEQ ID NO: 843 - protein, 220 aa, synthetic construct; identical to SEQ ID NO: 484
  source 1..220: note = XENP45650 Chain 2- STEAP-A[STEAP1]_L1_Light Chain

SEQ ID NO: 844 - protein, 453 aa, synthetic construct
  source 1..453: note = XENP45651 Chain 1- STEAP-A[STEAP1]_H1.58_IgG1_PVA_/S267K
QVQVQESGPGLVKPSQTLSLTCTVSGYSITSDYAWGWIRQPPGKKLEWIGYISNSGSTSYNPSLKSRVTISRDTSKNQFSLKLSSVTAADTAVYYCARERNYDYDDYYYAMDYWGQGTLVTVSSASTKGPSVFPLAPSSKSTSGGTAALGCLVKDYFPEPVTVSWNSGALTSGVHTFPAVLQSSGLYSLSSVVTVPSSSLGTQTYICNVNHKPSNTKVDKKVEPKSCDKTHTCPPCPAPPVAGPSVFLFPPKPKDTLMISRTPEVTCVVVDVKHEDPEVKFNWYVDGVEVHNAKTKPREEQYNSTYRVVSVLTVLHQDWLNGKEYKCKVSNKALPAPIEKTISKAKGQPREPQVYTLPPSREEMTKNQVSLTCLVKGFYPSDIAVEWESNGQPENNYKTTPPVLDSDGSFFLYSKLTVDKSRWQQGNVFSCSVMHEALHNHYTQKSLSLSPGK

SEQ ID NO: 845 - protein, 220 aa, synthetic construct; identical to SEQ ID NO: 484
  source 1..220: note = XENP45651 Chain 2- STEAP-A[STEAP1]_L1_Light Chain

SEQ ID NO: 846 - protein, 453 aa, synthetic construct
  source 1..453: note = XENP45652 Chain 1- STEAP-A[STEAP1]_H1.59_IgG1_PVA_/S267K
QVQVQESGPGLVKPSQTLSLTCTVSGYSITSDYAWHWIRQPPGKKLEWIGYISNSGSTSYNPSLKSRVTISRDTSKNQFSLKLSSVTAADTAVYYCARERNYDYDDYYYAMDYWGQGTLVTVSSASTKGPSVFPLAPSSKSTSGGTAALGCLVKDYFPEPVTVSWNSGALTSGVHTFPAVLQSSGLYSLSSVVTVPSSSLGTQTYICNVNHKPSNTKVDKKVEPKSCDKTHTCPPCPAPPVAGPSVFLFPPKPKDTLMISRTPEVTCVVVDVKHEDPEVKFNWYVDGVEVHNAKTKPREEQYNSTYRVVSVLTVLHQDWLNGKEYKCKVSNKALPAPIEKTISKAKGQPREPQVYTLPPSREEMTKNQVSLTCLVKGFYPSDIAVEWESNGQPENNYKTTPPVLDSDGSFFLYSKLTVDKSRWQQGNVFSCSVMHEALHNHYTQKSLSLSPGK

SEQ ID NO: 847 - protein, 220 aa, synthetic construct; identical to SEQ ID NO: 484
  source 1..220: note = XENP45652 Chain 2- STEAP-A[STEAP1]_L1_Light Chain

SEQ ID NO: 848 - protein, 453 aa, synthetic construct
  source 1..453: note = XENP45653 Chain 1- STEAP-A[STEAP1]_H1.60_IgG1_PVA_/S267K
QVQVQESGPGLVKPSQTLSLTCTVSGYSITSDYAWSWIRQPPGKKLEWIGYISNSGSTSYNPSLKSRVTISRDTSKNQFSLKLSSVTAADTAVYYCARERNYDYDDYYYAMDYWGQGTLVTVSSASTKGPSVFPLAPSSKSTSGGTAALGCLVKDYFPEPVTVSWNSGALTSGVHTFPAVLQSSGLYSLSSVVTVPSSSLGTQTYICNVNHKPSNTKVDKKVEPKSCDKTHTCPPCPAPPVAGPSVFLFPPKPKDTLMISRTPEVTCVVVDVKHEDPEVKFNWYVDGVEVHNAKTKPREEQYNSTYRVVSVLTVLHQDWLNGKEYKCKVSNKALPAPIEKTISKAKGQPREPQVYTLPPSREEMTKNQVSLTCLVKGFYPSDIAVEWESNGQPENNYKTTPPVLDSDGSFFLYSKLTVDKSRWQQGNVFSCSVMHEALHNHYTQKSLSLSPGK

SEQ ID NO: 849 - protein, 220 aa, synthetic construct; identical to SEQ ID NO: 484
  source 1..220: note = XENP45653 Chain 2- STEAP-A[STEAP1]_L1_Light Chain

SEQ ID NO: 850 - protein, 453 aa, synthetic construct
  source 1..453: note = XENP45654 Chain 1- STEAP-A[STEAP1]_H1.61_IgG1_PVA_/S267K
QVQVQESGPGLVKPSQTLSLTCTVSGYSITSDYAWTWIRQPPGKKLEWIGYISNSGSTSYNPSLKSRVTISRDTSKNQFSLKLSSVTAADTAVYYCARERNYDYDDYYYAMDYWGQGTLVTVSSASTKGPSVFPLAPSSKSTSGGTAALGCLVKDYFPEPVTVSWNSGALTSGVHTFPAVLQSSGLYSLSSVVTVPSSSLGTQTYICNVNHKPSNTKVDKKVEPKSCDKTHTCPPCPAPPVAGPSVFLFPPKPKDTLMISRTPEVTCVVVDVKHEDPEVKFNWYVDGVEVHNAKTKPREEQYNSTYRVVSVLTVLHQDWLNGKEYKCKVSNKALPAPIEKTISKAKGQPREPQVYTLPPSREEMTKNQVSLTCLVKGFYPSDIAVEWESNGQPENNYKTTPPVLDSDGSFFLYSKLTVDKSRWQQGNVFSCSVMHEALHNHYTQKSLSLSPGK

SEQ ID NO: 851 - protein, 220 aa, synthetic construct; identical to SEQ ID NO: 484
  source 1..220: note = XENP45654 Chain 2- STEAP-A[STEAP1]_L1_Light Chain

SEQ ID NO: 852 - protein, 453 aa, synthetic construct
  source 1..453: note = XENP45655 Chain 1- STEAP-A[STEAP1]_H1.62_IgG1_PVA_/S267K
QVQVQESGPGLVKPSQTLSLTCTVSGYSITSDYAWNWIRQPPGKKLEWIGAISNSGSTSYNPSLKSRVTISRDTSKNQFSLKLSSVTAADTAVYYCARERNYDYDDYYYAMDYWGQGTLVTVSSASTKGPSVFPLAPSSKSTSGGTAALGCLVKDYFPEPVTVSWNSGALTSGVHTFPAVLQSSGLYSLSSVVTVPSSSLGTQTYICNVNHKPSNTKVDKKVEPKSCDKTHTCPPCPAPPVAGPSVFLFPPKPKDTLMISRTPEVTCVVVDVKHEDPEVKFNWYVDGVEVHNAKTKPREEQYNSTYRVVSVLTVLHQDWLNGKEYKCKVSNKALPAPIEKTISKAKGQPREPQVYTLPPSREEMTKNQVSLTCLVKGFYPSDIAVEWESNGQPENNYKTTPPVLDSDGSFFLYSKLTVDKSRWQQGNVFSCSVMHEALHNHYTQKSLSLSPGK

SEQ ID NO: 853 - protein, 220 aa, synthetic construct; identical to SEQ ID NO: 484
  source 1..220: note = XENP45655 Chain 2- STEAP-A[STEAP1]_L1_Light Chain

SEQ ID NO: 854 - protein, 453 aa, synthetic construct
  source 1..453: note = XENP45656 Chain 1- STEAP-A[STEAP1]_H1.63_IgG1_PVA_/S267K
QVQVQESGPGLVKPSQTLSLTCTVSGYSITSDYAWNWIRQPPGKKLEWIGDISNSGSTSYNPSLKSRVTISRDTSKNQFSLKLSSVTAADTAVYYCARERNYDYDDYYYAMDYWGQGTLVTVSSASTKGPSVFPLAPSSKSTSGGTAALGCLVKDYFPEPVTVSWNSGALTSGVHTFPAVLQSSGLYSLSSVVTVPSSSLGTQTYICNVNHKPSNTKVDKKVEPKSCDKTHTCPPCPAPPVAGPSVFLFPPKPKDTLMISRTPEVTCVVVDVKHEDPEVKFNWYVDGVEVHNAKTKPREEQYNSTYRVVSVLTVLHQDWLNGKEYKCKVSNKALPAPIEKTISKAKGQPREPQVYTLPPSREEMTKNQVSLTCLVKGFYPSDIAVEWESNGQPENNYKTTPPVLDSDGSFFLYSKLTVDKSRWQQGNVFSCSVMHEALHNHYTQKSLSLSPGK

SEQ ID NO: 855 - protein, 220 aa, synthetic construct; identical to SEQ ID NO: 484
  source 1..220: note = XENP45656 Chain 2- STEAP-A[STEAP1]_L1_Light Chain

SEQ ID NO: 856 - protein, 453 aa, synthetic construct
  source 1..453: note = XENP45657 Chain 1- STEAP-A[STEAP1]_H1.64_IgG1_PVA_/S267K
QVQVQESGPGLVKPSQTLSLTCTVSGYSITSDYAWNWIRQPPGKKLEWIGFISNSGSTSYNPSLKSRVTISRDTSKNQFSLKLSSVTAADTAVYYCARERNYDYDDYYYAMDYWGQGTLVTVSSASTKGPSVFPLAPSSKSTSGGTAALGCLVKDYFPEPVTVSWNSGALTSGVHTFPAVLQSSGLYSLSSVVTVPSSSLGTQTYICNVNHKPSNTKVDKKVEPKSCDKTHTCPPCPAPPVAGPSVFLFPPKPKDTLMISRTPEVTCVVVDVKHEDPEVKFNWYVDGVEVHNAKTKPREEQYNSTYRVVSVLTVLHQDWLNGKEYKCKVSNKALPAPIEKTISKAKGQPREPQVYTLPPSREEMTKNQVSLTCLVKGFYPSDIAVEWESNGQPENNYKTTPPVLDSDGSFFLYSKLTVDKSRWQQGNVFSCSVMHEALHNHYTQKSLSLSPGK

SEQ ID NO: 857 - protein, 220 aa, synthetic construct; identical to SEQ ID NO: 484
  source 1..220: note = XENP45657 Chain 2- STEAP-A[STEAP1]_L1_Light Chain

SEQ ID NO: 858 - protein, 453 aa, synthetic construct
  source 1..453: note = XENP45658 Chain 1- STEAP-A[STEAP1]_H1.65_IgG1_PVA_/S267K
QVQVQESGPGLVKPSQTLSLTCTVSGYSITSDYAWNWIRQPPGKKLEWIGHISNSGSTSYNPSLKSRVTISRDTSKNQFSLKLSSVTAADTAVYYCARERNYDYDDYYYAMDYWGQGTLVTVSSASTKGPSVFPLAPSSKSTSGGTAALGCLVKDYFPEPVTVSWNSGALTSGVHTFPAVLQSSGLYSLSSVVTVPSSSLGTQTYICNVNHKPSNTKVDKKVEPKSCDKTHTCPPCPAPPVAGPSVFLFPPKPKDTLMISRTPEVTCVVVDVKHEDPEVKFNWYVDGVEVHNAKTKPREEQYNSTYRVVSVLTVLHQDWLNGKEYKCKVSNKALPAPIEKTISKAKGQPREPQVYTLPPSREEMTKNQVSLTCLVKGFYPSDIAVEWESNGQPENNYKTTPPVLDSDGSFFLYSKLTVDKSRWQQGNVFSCSVMHEALHNHYTQKSLSLSPGK

SEQ ID NO: 859 - protein, 220 aa, synthetic construct; identical to SEQ ID NO: 484
  source 1..220: note = XENP45658 Chain 2- STEAP-A[STEAP1]_L1_Light Chain

SEQ ID NO: 860 - protein, 453 aa, synthetic construct
  source 1..453: note = XENP45659 Chain 1- STEAP-A[STEAP1]_H1.66_IgG1_PVA_/S267K
QVQVQESGPGLVKPSQTLSLTCTVSGYSITSDYAWNWIRQPPGKKLEWIGKISNSGSTSYNPSLKSRVTISRDTSKNQFSLKLSSVTAADTAVYYCARERNYDYDDYYYAMDYWGQGTLVTVSSASTKGPSVFPLAPSSKSTSGGTAALGCLVKDYFPEPVTVSWNSGALTSGVHTFPAVLQSSGLYSLSSVVTVPSSSLGTQTYICNVNHKPSNTKVDKKVEPKSCDKTHTCPPCPAPPVAGPSVFLFPPKPKDTLMISRTPEVTCVVVDVKHEDPEVKFNWYVDGVEVHNAKTKPREEQYNSTYRVVSVLTVLHQDWLNGKEYKCKVSNKALPAPIEKTISKAKGQPREPQVYTLPPSREEMTKNQVSLTCLVKGFYPSDIAVEWESNGQPENNYKTTPPVLDSDGSFFLYSKLTVDKSRWQQGNVFSCSVMHEALHNHYTQKSLSLSPGK

SEQ ID NO: 861 - protein, 220 aa, synthetic construct; identical to SEQ ID NO: 484
  source 1..220: note = XENP45659 Chain 2- STEAP-A[STEAP1]_L1_Light Chain

SEQ ID NO: 862 - protein, 453 aa, synthetic construct
  source 1..453: note = XENP45660 Chain 1- STEAP-A[STEAP1]_H1.67_IgG1_PVA_/S267K
QVQVQESGPGLVKPSQTLSLTCTVSGYSITSDYAWNWIRQPPGKKLEWIGLISNSGSTSYNPSLKSRVTISRDTSKNQFSLKLSSVTAADTAVYYCARERNYDYDDYYYAMDYWGQGTLVTVSSASTKGPSVFPLAPSSKSTSGGTAALGCLVKDYFPEPVTVSWNSGALTSGVHTFPAVLQSSGLYSLSSVVTVPSSSLGTQTYICNVNHKPSNTKVDKKVEPKSCDKTHTCPPCPAPPVAGPSVFLFPPKPKDTLMISRTPEVTCVVVDVKHEDPEVKFNWYVDGVEVHNAKTKPREEQYNSTYRVVSVLTVLHQDWLNGKEYKCKVSNKALPAPIEKTISKAKGQPREPQVYTLPPSREEMTKNQVSLTCLVKGFYPSDIAVEWESNGQPENNYKTTPPVLDSDGSFFLYSKLTVDKSRWQQGNVFSCSVMHEALHNHYTQKSLSLSPGK

SEQ ID NO: 863 - protein, 220 aa, synthetic construct; identical to SEQ ID NO: 484
  source 1..220: note = XENP45660 Chain 2- STEAP-A[STEAP1]_L1_Light Chain

SEQ ID NO: 864 - protein, 453 aa, synthetic construct
  source 1..453: note = XENP45661 Chain 1- STEAP-A[STEAP1]_H1.68_IgG1_PVA_/S267K
QVQVQESGPGLVKPSQTLSLTCTVSGYSITSDYAWNWIRQPPGKKLEWIGQISNSGSTSYNPSLKSRVTISRDTSKNQFSLKLSSVTAADTAVYYCARERNYDYDDYYYAMDYWGQGTLVTVSSASTKGPSVFPLAPSSKSTSGGTAALGCLVKDYFPEPVTVSWNSGALTSGVHTFPAVLQSSGLYSLSSVVTVPSSSLGTQTYICNVNHKPSNTKVDKKVEPKSCDKTHTCPPCPAPPVAGPSVFLFPPKPKDTLMISRTPEVTCVVVDVKHEDPEVKFNWYVDGVEVHNAKTKPREEQYNSTYRVVSVLTVLHQDWLNGKEYKCKVSNKALPAPIEKTISKAKGQPREPQVYTLPPSREEMTKNQVSLTCLVKGFYPSDIAVEWESNGQPENNYKTTPPVLDSDGSFFLYSKLTVDKSRWQQGNVFSCSVMHEALHNHYTQKSLSLSPGK

SEQ ID NO: 865 - protein, 220 aa, synthetic construct; identical to SEQ ID NO: 484
  source 1..220: note = XENP45661 Chain 2- STEAP-A[STEAP1]_L1_Light Chain

SEQ ID NO: 866 - protein, 453 aa, synthetic construct
  source 1..453: note = XENP45662 Chain 1- STEAP-A[STEAP1]_H1.69_IgG1_PVA_/S267K
QVQVQESGPGLVKPSQTLSLTCTVSGYSITSDYAWNWIRQPPGKKLEWIGVISNSGSTSYNPSLKSRVTISRDTSKNQFSLKLSSVTAADTAVYYCARERNYDYDDYYYAMDYWGQGTLVTVSSASTKGPSVFPLAPSSKSTSGGTAALGCLVKDYFPEPVTVSWNSGALTSGVHTFPAVLQSSGLYSLSSVVTVPSSSLGTQTYICNVNHKPSNTKVDKKVEPKSCDKTHTCPPCPAPPVAGPSVFLFPPKPKDTLMISRTPEVTCVVVDVKHEDPEVKFNWYVDGVEVHNAKTKPREEQYNSTYRVVSVLTVLHQDWLNGKEYKCKVSNKALPAPIEKTISKAKGQPREPQVYTLPPSREEMTKNQVSLTCLVKGFYPSDIAVEWESNGQPENNYKTTPPVLDSDGSFFLYSKLTVDKSRWQQGNVFSCSVMHEALHNHYTQKSLSLSPGK

SEQ ID NO: 867 - protein, 220 aa, synthetic construct; identical to SEQ ID NO: 484
  source 1..220: note = XENP45662 Chain 2- STEAP-A[STEAP1]_L1_Light Chain

SEQ ID NO: 868 - protein, 453 aa, synthetic construct
  source 1..453: note = XENP45663 Chain 1- STEAP-A[STEAP1]_H1.70_IgG1_PVA_/S267K
QVQVQESGPGLVKPSQTLSLTCTVSGYSITSDYAWNWIRQPPGKKLEWIGWISNSGSTSYNPSLKSRVTISRDTSKNQFSLKLSSVTAADTAVYYCARERNYDYDDYYYAMDYWGQGTLVTVSSASTKGPSVFPLAPSSKSTSGGTAALGCLVKDYFPEPVTVSWNSGALTSGVHTFPAVLQSSGLYSLSSVVTVPSSSLGTQTYICNVNHKPSNTKVDKKVEPKSCDKTHTCPPCPAPPVAGPSVFLFPPKPKDTLMISRTPEVTCVVVDVKHEDPEVKFNWYVDGVEVHNAKTKPREEQYNSTYRVVSVLTVLHQDWLNGKEYKCKVSNKALPAPIEKTISKAKGQPREPQVYTLPPSREEMTKNQVSLTCLVKGFYPSDIAVEWESNGQPENNYKTTPPVLDSDGSFFLYSKLTVDKSRWQQGNVFSCSVMHEALHNHYTQKSLSLSPGK

SEQ ID NO: 869 - protein, 220 aa, synthetic construct; identical to SEQ ID NO: 484
  source 1..220: note = XENP45663 Chain 2- STEAP-A[STEAP1]_L1_Light Chain

SEQ ID NO: 870 - protein, 453 aa, synthetic construct
  source 1..453: note = XENP45664 Chain 1- STEAP-A[STEAP1]_H1.71_IgG1_PVA_/S267K
QVQVQESGPGLVKPSQTLSLTCTVSGYSITSDYAWNWIRQPPGKKLEWIGYIANSGSTSYNPSLKSRVTISRDTSKNQFSLKLSSVTAADTAVYYCARERNYDYDDYYYAMDYWGQGTLVTVSSASTKGPSVFPLAPSSKSTSGGTAALGCLVKDYFPEPVTVSWNSGALTSGVHTFPAVLQSSGLYSLSSVVTVPSSSLGTQTYICNVNHKPSNTKVDKKVEPKSCDKTHTCPPCPAPPVAGPSVFLFPPKPKDTLMISRTPEVTCVVVDVKHEDPEVKFNWYVDGVEVHNAKTKPREEQYNSTYRVVSVLTVLHQDWLNGKEYKCKVSNKALPAPIEKTISKAKGQPREPQVYTLPPSREEMTKNQVSLTCLVKGFYPSDIAVEWESNGQPENNYKTTPPVLDSDGSFFLYSKLTVDKSRWQQGNVFSCSVMHEALHNHYTQKSLSLSPGK

SEQ ID NO: 871 - protein, 220 aa, synthetic construct; identical to SEQ ID NO: 484
  source 1..220: note = XENP45664 Chain 2- STEAP-A[STEAP1]_L1_Light Chain

SEQ ID NO: 872 - protein, 453 aa, synthetic construct
  source 1..453: note = XENP45665 Chain 1- STEAP-A[STEAP1]_H1.72_IgG1_PVA_/S267K
QVQVQESGPGLVKPSQTLSLTCTVSGYSITSDYAWNWIRQPPGKKLEWIGYIDNSGSTSYNPSLKSRVTISRDTSKNQFSLKLSSVTAADTAVYYCARERNYDYDDYYYAMDYWGQGTLVTVSSASTKGPSVFPLAPSSKSTSGGTAALGCLVKDYFPEPVTVSWNSGALTSGVHTFPAVLQSSGLYSLSSVVTVPSSSLGTQTYICNVNHKPSNTKVDKKVEPKSCDKTHTCPPCPAPPVAGPSVFLFPPKPKDTLMISRTPEVTCVVVDVKHEDPEVKFNWYVDGVEVHNAKTKPREEQYNSTYRVVSVLTVLHQDWLNGKEYKCKVSNKALPAPIEKTISKAKGQPREPQVYTLPPSREEMTKNQVSLTCLVKGFYPSDIAVEWESNGQPENNYKTTPPVLDSDGSFFLYSKLTVDKSRWQQGNVFSCSVMHEALHNHYTQKSLSLSPGK

SEQ ID NO: 873 - protein, 220 aa, synthetic construct; identical to SEQ ID NO: 484
  source 1..220: note = XENP45665 Chain 2- STEAP-A[STEAP1]_L1_Light Chain

SEQ ID NO: 874 - protein, 453 aa, synthetic construct
  source 1..453: note = XENP45666 Chain 1- STEAP-A[STEAP1]_H1.73_IgG1_PVA_/S267K
QVQVQESGPGLVKPSQTLSLTCTVSGYSITSDYAWNWIRQPPGKKLEWIGYIGNSGSTSYNPSLKSRVTISRDTSKNQFSLKLSSVTAADTAVYYCARERNYDYDDYYYAMDYWGQGTLVTVSSASTKGPSVFPLAPSSKSTSGGTAALGCLVKDYFPEPVTVSWNSGALTSGVHTFPAVLQSSGLYSLSSVVTVPSSSLGTQTYICNVNHKPSNTKVDKKVEPKSCDKTHTCPPCPAPPVAGPSVFLFPPKPKDTLMISRTPEVTCVVVDVKHEDPEVKFNWYVDGVEVHNAKTKPREEQYNSTYRVVSVLTVLHQDWLNGKEYKCKVSNKALPAPIEKTISKAKGQPREPQVYTLPPSREEMTKNQVSLTCLVKGFYPSDIAVEWESNGQPENNYKTTPPVLDSDGSFFLYSKLTVDKSRWQQGNVFSCSVMHEALHNHYTQKSLSLSPGK

SEQ ID NO: 875 - protein, 220 aa, synthetic construct; identical to SEQ ID NO: 484
  source 1..220: note = XENP45666 Chain 2- STEAP-A[STEAP1]_L1_Light Chain

SEQ ID NO: 876 - protein, 453 aa, synthetic construct
  source 1..453: note = XENP45667 Chain 1- STEAP-A[STEAP1]_H1.74_IgG1_PVA_/S267K
QVQVQESGPGLVKPSQTLSLTCTVSGYSITSDYAWNWIRQPPGKKLEWIGYIHNSGSTSYNPSLKSRVTISRDTSKNQFSLKLSSVTAADTAVYYCARERNYDYDDYYYAMDYWGQGTLVTVSSASTKGPSVFPLAPSSKSTSGGTAALGCLVKDYFPEPVTVSWNSGALTSGVHTFPAVLQSSGLYSLSSVVTVPSSSLGTQTYICNVNHKPSNTKVDKKVEPKSCDKTHTCPPCPAPPVAGPSVFLFPPKPKDTLMISRTPEVTCVVVDVKHEDPEVKFNWYVDGVEVHNAKTKPREEQYNSTYRVVSVLTVLHQDWLNGKEYKCKVSNKALPAPIEKTISKAKGQPREPQVYTLPPSREEMTKNQVSLTCLVKGFYPSDIAVEWESNGQPENNYKTTPPVLDSDGSFFLYSKLTVDKSRWQQGNVFSCSVMHEALHNHYTQKSLSLSPGK

SEQ ID NO: 877 - protein, 220 aa, synthetic construct; identical to SEQ ID NO: 484
  source 1..220: note = XENP45667 Chain 2- STEAP-A[STEAP1]_L1_Light Chain

SEQ ID NO: 878 - protein, 453 aa, synthetic construct
  source 1..453: note = XENP45668 Chain 1- STEAP-A[STEAP1]_H1.75_IgG1_PVA_/S267K
QVQVQESGPGLVKPSQTLSLTCTVSGYSITSDYAWNWIRQPPGKKLEWIGYIKNSGSTSYNPSLKSRVTISRDTSKNQFSLKLSSVTAADTAVYYCARERNYDYDDYYYAMDYWGQGTLVTVSSASTKGPSVFPLAPSSKSTSGGTAALGCLVKDYFPEPVTVSWNSGALTSGVHTFPAVLQSSGLYSLSSVVTVPSSSLGTQTYICNVNHKPSNTKVDKKVEPKSCDKTHTCPPCPAPPVAGPSVFLFPPKPKDTLMISRTPEVTCVVVDVKHEDPEVKFNWYVDGVEVHNAKTKPREEQYNSTYRVVSVLTVLHQDWLNGKEYKCKVSNKALPAPIEKTISKAKGQPREPQVYTLPPSREEMTKNQVSLTCLVKGFYPSDIAVEWESNGQPENNYKTTPPVLDSDGSFFLYSKLTVDKSRWQQGNVFSCSVMHEALHNHYTQKSLSLSPGK

SEQ ID NO: 879 - protein, 220 aa, synthetic construct; identical to SEQ ID NO: 484
  source 1..220: note = XENP45668 Chain 2- STEAP-A[STEAP1]_L1_Light Chain

SEQ ID NO: 880 - protein, 453 aa, synthetic construct
  source 1..453: note = XENP45669 Chain 1- STEAP-A[STEAP1]_H1.76_IgG1_PVA_/S267K
QVQVQESGPGLVKPSQTLSLTCTVSGYSITSDYAWNWIRQPPGKKLEWIGYIQNSGSTSYNPSLKSRVTISRDTSKNQFSLKLSSVTAADTAVYYCARERNYDYDDYYYAMDYWGQGTLVTVSSASTKGPSVFPLAPSSKSTSGGTAALGCLVKDYFPEPVTVSWNSGALTSGVHTFPAVLQSSGLYSLSSVVTVPSSSLGTQTYICNVNHKPSNTKVDKKVEPKSCDKTHTCPPCPAPPVAGPSVFLFPPKPKDTLMISRTPEVTCVVVDVKHEDPEVKFNWYVDGVEVHNAKTKPREEQYNSTYRVVSVLTVLHQDWLNGKEYKCKVSNKALPAPIEKTISKAKGQPREPQVYTLPPSREEMTKNQVSLTCLVKGFYPSDIAVEWESNGQPENNYKTTPPVLDSDGSFFLYSKLTVDKSRWQQGNVFSCSVMHEALHNHYTQKSLSLSPGK

SEQ ID NO: 881 - protein, 220 aa, synthetic construct; identical to SEQ ID NO: 484
  source 1..220: note = XENP45669 Chain 2- STEAP-A[STEAP1]_L1_Light Chain

SEQ ID NO: 882 - protein, 453 aa, synthetic construct
  source 1..453: note = XENP45670 Chain 1- STEAP-A[STEAP1]_H1.77_IgG1_PVA_/S267K
QVQVQESGPGLVKPSQTLSLTCTVSGYSITSDYAWNWIRQPPGKKLEWIGYITNSGSTSYNPSLKSRVTISRDTSKNQFSLKLSSVTAADTAVYYCARERNYDYDDYYYAMDYWGQGTLVTVSSASTKGPSVFPLAPSSKSTSGGTAALGCLVKDYFPEPVTVSWNSGALTSGVHTFPAVLQSSGLYSLSSVVTVPSSSLGTQTYICNVNHKPSNTKVDKKVEPKSCDKTHTCPPCPAPPVAGPSVFLFPPKPKDTLMISRTPEVTCVVVDVKHEDPEVKFNWYVDGVEVHNAKTKPREEQYNSTYRVVSVLTVLHQDWLNGKEYKCKVSNKALPAPIEKTISKAKGQPREPQVYTLPPSREEMTKNQVSLTCLVKGFYPSDIAVEWESNGQPENNYKTTPPVLDSDGSFFLYSKLTVDKSRWQQGNVFSCSVMHEALHNHYTQKSLSLSPGK

SEQ ID NO: 883 - protein, 220 aa, synthetic construct; identical to SEQ ID NO: 484
  source 1..220: note = XENP45670 Chain 2- STEAP-A[STEAP1]_L1_Light Chain

SEQ ID NO: 884 - protein, 453 aa, synthetic construct
  source 1..453: note = XENP45671 Chain 1- STEAP-A[STEAP1]_H1.78_IgG1_PVA_/S267K
QVQVQESGPGLVKPSQTLSLTCTVSGYSITSDYAWNWIRQPPGKKLEWIGYIVNSGSTSYNPSLKSRVTISRDTSKNQFSLKLSSVTAADTAVYYCARERNYDYDDYYYAMDYWGQGTLVTVSSASTKGPSVFPLAPSSKSTSGGTAALGCLVKDYFPEPVTVSWNSGALTSGVHTFPAVLQSSGLYSLSSVVTVPSSSLGTQTYICNVNHKPSNTKVDKKVEPKSCDKTHTCPPCPAPPVAGPSVFLFPPKPKDTLMISRTPEVTCVVVDVKHEDPEVKFNWYVDGVEVHNAKTKPREEQYNSTYRVVSVLTVLHQDWLNGKEYKCKVSNKALPAPIEKTISKAKGQPREPQVYTLPPSREEMTKNQVSLTCLVKGFYPSDIAVEWESNGQPENNYKTTPPVLDSDGSFFLYSKLTVDKSRWQQGNVFSCSVMHEALHNHYTQKSLSLSPGK

SEQ ID NO: 885 - protein, 220 aa, synthetic construct; identical to SEQ ID NO: 484
  source 1..220: note = XENP45671 Chain 2- STEAP-A[STEAP1]_L1_Light Chain

SEQ ID NO: 886 - protein, 453 aa, synthetic construct
  source 1..453: note = XENP45672 Chain 1- STEAP-A[STEAP1]_H1.79_IgG1_PVA_/S267K
QVQVQESGPGLVKPSQTLSLTCTVSGYSITSDYAWNWIRQPPGKKLEWIGYIYNSGSTSYNPSLKSRVTISRDTSKNQFSLKLSSVTAADTAVYYCARERNYDYDDYYYAMDYWGQGTLVTVSSASTKGPSVFPLAPSSKSTSGGTAALGCLVKDYFPEPVTVSWNSGALTSGVHTFPAVLQSSGLYSLSSVVTVPSSSLGTQTYICNVNHKPSNTKVDKKVEPKSCDKTHTCPPCPAPPVAGPSVFLFPPKPKDTLMISRTPEVTCVVVDVKHEDPEVKFNWYVDGVEVHNAKTKPREEQYNSTYRVVSVLTVLHQDWLNGKEYKCKVSNKALPAPIEKTISKAKGQPREPQVYTLPPSREEMTKNQVSLTCLVKGFYPSDIAVEWESNGQPENNYKTTPPVLDSDGSFFLYSKLTVDKSRWQQGNVFSCSVMHEALHNHYTQKSLSLSPGK

SEQ ID NO: 887 - protein, 220 aa, synthetic construct; identical to SEQ ID NO: 484
  source 1..220: note = XENP45672 Chain 2- STEAP-A[STEAP1]_L1_Light Chain

SEQ ID NO: 888 - protein, 453 aa, synthetic construct
  source 1..453: note = XENP45673 Chain 1- STEAP-A[STEAP1]_H1.80_IgG1_PVA_/S267K
QVQVQESGPGLVKPSQTLSLTCTVSGYSITSDYAWNWIRQPPGKKLEWIGYISESGSTSYNPSLKSRVTISRDTSKNQFSLKLSSVTAADTAVYYCARERNYDYDDYYYAMDYWGQGTLVTVSSASTKGPSVFPLAPSSKSTSGGTAALGCLVKDYFPEPVTVSWNSGALTSGVHTFPAVLQSSGLYSLSSVVTVPSSSLGTQTYICNVNHKPSNTKVDKKVEPKSCDKTHTCPPCPAPPVAGPSVFLFPPKPKDTLMISRTPEVTCVVVDVKHEDPEVKFNWYVDGVEVHNAKTKPREEQYNSTYRVVSVLTVLHQDWLNGKEYKCKVSNKALPAPIEKTISKAKGQPREPQVYTLPPSREEMTKNQVSLTCLVKGFYPSDIAVEWESNGQPENNYKTTPPVLDSDGSFFLYSKLTVDKSRWQQGNVFSCSVMHEALHNHYTQKSLSLSPGK

SEQ ID NO: 889 - protein, 220 aa, synthetic construct; identical to SEQ ID NO: 484
  source 1..220: note = XENP45673 Chain 2- STEAP-A[STEAP1]_L1_Light Chain

SEQ ID NO: 890 - protein, 453 aa, synthetic construct
  source 1..453: note = XENP45674 Chain 1- STEAP-A[STEAP1]_H1.81_IgG1_PVA_/S267K
QVQVQESGPGLVKPSQTLSLTCTVSGYSITSDYAWNWIRQPPGKKLEWIGYISHSGSTSYNPSLKSRVTISRDTSKNQFSLKLSSVTAADTAVYYCARERNYDYDDYYYAMDYWGQGTLVTVSSASTKGPSVFPLAPSSKSTSGGTAALGCLVKDYFPEPVTVSWNSGALTSGVHTFPAVLQSSGLYSLSSVVTVPSSSLGTQTYICNVNHKPSNTKVDKKVEPKSCDKTHTCPPCPAPPVAGPSVFLFPPKPKDTLMISRTPEVTCVVVDVKHEDPEVKFNWYVDGVEVHNAKTKPREEQYNSTYRVVSVLTVLHQDWLNGKEYKCKVSNKALPAPIEKTISKAKGQPREPQVYTLPPSREEMTKNQVSLTCLVKGFYPSDIAVEWESNGQPENNYKTTPPVLDSDGSFFLYSKLTVDKSRWQQGNVFSCSVMHEALHNHYTQKSLSLSPGK

SEQ ID NO: 891 - protein, 220 aa, synthetic construct; identical to SEQ ID NO: 484
  source 1..220: note = XENP45674 Chain 2- STEAP-A[STEAP1]_L1_Light Chain

SEQ ID NO: 892 - protein, 453 aa, synthetic construct
  source 1..453: note = XENP45675 Chain 1- STEAP-A[STEAP1]_H1.82_IgG1_PVA_/S267K
QVQVQESGPGLVKPSQTLSLTCTVSGYSITSDYAWNWIRQPPGKKLEWIGYISLSGSTSYNPSLKSRVTISRDTSKNQFSLKLSSVTAADTAVYYCARERNYDYDDYYYAMDYWGQGTLVTVSSASTKGPSVFPLAPSSKSTSGGTAALGCLVKDYFPEPVTVSWNSGALTSGVHTFPAVLQSSGLYSLSSVVTVPSSSLGTQTYICNVNHKPSNTKVDKKVEPKSCDKTHTCPPCPAPPVAGPSVFLFPPKPKDTLMISRTPEVTCVVVDVKHEDPEVKFNWYVDGVEVHNAKTKPREEQYNSTYRVVSVLTVLHQDWLNGKEYKCKVSNKALPAPIEKTISKAKGQPREPQVYTLPPSREEMTKNQVSLTCLVKGFYPSDIAVEWESNGQPENNYKTTPPVLDSDGSFFLYSKLTVDKSRWQQGNVFSCSVMHEALHNHYTQKSLSLSPGK

SEQ ID NO: 893 - protein, 220 aa, synthetic construct; identical to SEQ ID NO: 484
  source 1..220: note = XENP45675 Chain 2- STEAP-A[STEAP1]_L1_Light Chain

SEQ ID NO: 894 - protein, 453 aa, synthetic construct
  source 1..453: note = XENP45676 Chain 1- STEAP-A[STEAP1]_H1.83_IgG1_PVA_/S267K
QVQVQESGPGLVKPSQTLSLTCTVSGYSITSDYAWNWIRQPPGKKLEWIGYISQSGSTSYNPSLKSRVTISRDTSKNQFSLKLSSVTAADTAVYYCARERNYDYDDYYYAMDYWGQGTLVTVSSASTKGPSVFPLAPSSKSTSGGTAALGCLVKDYFPEPVTVSWNSGALTSGVHTFPAVLQSSGLYSLSSVVTVPSSSLGTQTYICNVNHKPSNTKVDKKVEPKSCDKTHTCPPCPAPPVAGPSVFLFPPKPKDTLMISRTPEVTCVVVDVKHEDPEVKFNWYVDGVEVHNAKTKPREEQYNSTYRVVSVLTVLHQDWLNGKEYKCKVSNKALPAPIEKTISKAKGQPREPQVYTLPPSREEMTKNQVSLTCLVKGFYPSDIAVEWESNGQPENNYKTTPPVLDSDGSFFLYSKLTVDKSRWQQGNVFSCSVMHEALHNHYTQKSLSLSPGK

SEQ ID NO: 895 - protein, 220 aa, synthetic construct; identical to SEQ ID NO: 484
  source 1..220: note = XENP45676 Chain 2- STEAP-A[STEAP1]_L1_Light Chain

SEQ ID NO: 896 - protein, 453 aa, synthetic construct
  source 1..453: note = XENP45677 Chain 1- STEAP-A[STEAP1]_H1.84_IgG1_PVA_/S267K
QVQVQESGPGLVKPSQTLSLTCTVSGYSITSDYAWNWIRQPPGKKLEWIGYISRSGSTSYNPSLKSRVTISRDTSKNQFSLKLSSVTAADTAVYYCARERNYDYDDYYYAMDYWGQGTLVTVSSASTKGPSVFPLAPSSKSTSGGTAALGCLVKDYFPEPVTVSWNSGALTSGVHTFPAVLQSSGLYSLSSVVTVPSSSLGTQTYICNVNHKPSNTKVDKKVEPKSCDKTHTCPPCPAPPVAGPSVFLFPPKPKDTLMISRTPEVTCVVVDVKHEDPEVKFNWYVDGVEVHNAKTKPREEQYNSTYRVVSVLTVLHQDWLNGKEYKCKVSNKALPAPIEKTISKAKGQPREPQVYTLPPSREEMTKNQVSLTCLVKGFYPSDIAVEWESNGQPENNYKTTPPVLDSDGSFFLYSKLTVDKSRWQQGNVFSCSVMHEALHNHYTQKSLSLSPGK

SEQ ID NO: 897 - protein, 220 aa, synthetic construct; identical to SEQ ID NO: 484
  source 1..220: note = XENP45677 Chain 2- STEAP-A[STEAP1]_L1_Light Chain

SEQ ID NO: 898 - protein, 453 aa, synthetic construct
  source 1..453: note = XENP45678 Chain 1- STEAP-A[STEAP1]_H1.85_IgG1_PVA_/S267K
QVQVQESGPGLVKPSQTLSLTCTVSGYSITSDYAWNWIRQPPGKKLEWIGYISNAGSTSYNPSLKSRVTISRDTSKNQFSLKLSSVTAADTAVYYCARERNYDYDDYYYAMDYWGQGTLVTVSSASTKGPSVFPLAPSSKSTSGGTAALGCLVKDYFPEPVTVSWNSGALTSGVHTFPAVLQSSGLYSLSSVVTVPSSSLGTQTYICNVNHKPSNTKVDKKVEPKSCDKTHTCPPCPAPPVAGPSVFLFPPKPKDTLMISRTPEVTCVVVDVKHEDPEVKFNWYVDGVEVHNAKTKPREEQYNSTYRVVSVLTVLHQDWLNGKEYKCKVSNKALPAPIEKTISKAKGQPREPQVYTLPPSREEMTKNQVSLTCLVKGFYPSDIAVEWESNGQPENNYKTTPPVLDSDGSFFLYSKLTVDKSRWQQGNVFSCSVMHEALHNHYTQKSLSLSPGK

SEQ ID NO: 899 - protein, 220 aa, synthetic construct; identical to SEQ ID NO: 484
  source 1..220: note = XENP45678 Chain 2- STEAP-A[STEAP1]_L1_Light Chain

SEQ ID NO: 900 - protein, 453 aa, synthetic construct
  source 1..453: note = XENP45679 Chain 1- STEAP-A[STEAP1]_H1.86_IgG1_PVA_/S267K
QVQVQESGPGLVKPSQTLSLTCTVSGYSITSDYAWNWIRQPPGKKLEWIGYISNEGSTSYNPSLKSRVTISRDTSKNQFSLKLSSVTAADTAVYYCARERNYDYDDYYYAMDYWGQGTLVTVSSASTKGPSVFPLAPSSKSTSGGTAALGCLVKDYFPEPVTVSWNSGALTSGVHTFPAVLQSSGLYSLSSVVTVPSSSLGTQTYICNVNHKPSNTKVDKKVEPKSCDKTHTCPPCPAPPVAGPSVFLFPPKPKDTLMISRTPEVTCVVVDVKHEDPEVKFNWYVDGVEVHNAKTKPREEQYNSTYRVVSVLTVLHQDWLNGKEYKCKVSNKALPAPIEKTISKAKGQPREPQVYTLPPSREEMTKNQVSLTCLVKGFYPSDIAVEWESNGQPENNYKTTPPVLDSDGSFFLYSKLTVDKSRWQQGNVFSCSVMHEALHNHYTQKSLSLSPGK

SEQ ID NO: 901 - protein, 220 aa, synthetic construct; identical to SEQ ID NO: 484
  source 1..220: note = XENP45679 Chain 2- STEAP-A[STEAP1]_L1_Light Chain

SEQ ID NO: 902 - protein, 453 aa, synthetic construct
  source 1..453: note = XENP45680 Chain 1- STEAP-A[STEAP1]_H1.87_gG1_PVA_/S267K
QVQVQESGPGLVKPSQTLSLTCTVSGYSITSDYAWNWIRQPPGKKLEWIGYISNGGSTSYNPSLKSRVTISRDTSKNQFSLKLSSVTAADTAVYYCARERNYDYDDYYYAMDYWGQGTLVTVSSASTKGPSVFPLAPSSKSTSGGTAALGCLVKDYFPEPVTVSWNSGALTSGVHTFPAVLQSSGLYSLSSVVTVPSSSLGTQTYICNVNHKPSNTKVDKKVEPKSCDKTHTCPPCPAPPVAGPSVFLFPPKPKDTLMISRTPEVTCVVVDVKHEDPEVKFNWYVDGVEVHNAKTKPREEQYNSTYRVVSVLTVLHQDWLNGKEYKCKVSNKALPAPIEKTISKAKGQPREPQVYTLPPSREEMTKNQVSLTCLVKGFYPSDIAVEWESNGQPENNYKTTPPVLDSDGSFFLYSKLTVDKSRWQQGNVFSCSVMHEALHNHYTQKSLSLSPGK

SEQ ID NO: 903 - protein, 220 aa, synthetic construct; identical to SEQ ID NO: 484
  source 1..220: note = XENP45680 Chain 2- STEAP-A[STEAP1]_L1_Light Chain

SEQ ID NO: 904 - protein, 453 aa, synthetic construct
  source 1..453: note = XENP45681 Chain 1- STEAP-A[STEAP1]_H1.88_IgG1_PVA_/S267K
QVQVQESGPGLVKPSQTLSLTCTVSGYSITSDYAWNWIRQPPGKKLEWIGYISNHGSTSYNPSLKSRVTISRDTSKNQFSLKLSSVTAADTAVYYCARERNYDYDDYYYAMDYWGQGTLVTVSSASTKGPSVFPLAPSSKSTSGGTAALGCLVKDYFPEPVTVSWNSGALTSGVHTFPAVLQSSGLYSLSSVVTVPSSSLGTQTYICNVNHKPSNTKVDKKVEPKSCDKTHTCPPCPAPPVAGPSVFLFPPKPKDTLMISRTPEVTCVVVDVKHEDPEVKFNWYVDGVEVHNAKTKPREEQYNSTYRVVSVLTVLHQDWLNGKEYKCKVSNKALPAPIEKTISKAKGQPREPQVYTLPPSREEMTKNQVSLTCLVKGFYPSDIAVEWESNGQPENNYKTTPPVLDSDGSFFLYSKLTVDKSRWQQGNVFSCSVMHEALHNHYTQKSLSLSPGK

SEQ ID NO: 905 - protein, 220 aa, synthetic construct; identical to SEQ ID NO: 484
  source 1..220: note = XENP45681 Chain 2- STEAP-A[STEAP1]_L1_Light Chain

SEQ ID NO: 906 - protein, 453 aa, synthetic construct
  source 1..453: note = XENP45682 Chain 1- STEAP-A[STEAP1]_H1.89_IgG1_PVA_/S267K
QVQVQESGPGLVKPSQTLSLTCTVSGYSITSDYAWNWIRQPPGKKLEWIGYISNIGSTSYNPSLKSRVTISRDTSKNQFSLKLSSVTAADTAVYYCARERNYDYDDYYYAMDYWGQGTLVTVSSASTKGPSVFPLAPSSKSTSGGTAALGCLVKDYFPEPVTVSWNSGALTSGVHTFPAVLQSSGLYSLSSVVTVPSSSLGTQTYICNVNHKPSNTKVDKKVEPKSCDKTHTCPPCPAPPVAGPSVFLFPPKPKDTLMISRTPEVTCVVVDVKHEDPEVKFNWYVDGVEVHNAKTKPREEQYNSTYRVVSVLTVLHQDWLNGKEYKCKVSNKALPAPIEKTISKAKGQPREPQVYTLPPSREEMTKNQVSLTCLVKGFYPSDIAVEWESNGQPENNYKTTPPVLDSDGSFFLYSKLTVDKSRWQQGNVFSCSVMHEALHNHYTQKSLSLSPGK

SEQ ID NO: 907 - protein, 220 aa, synthetic construct; identical to SEQ ID NO: 484
  source 1..220: note = XENP45682 Chain 2- STEAP-A[STEAP1]_L1_Light Chain

SEQ ID NO: 908 - protein, 453 aa, synthetic construct
  source 1..453: note = XENP45683 Chain 1- STEAP-A[STEAP1]_H1.90_IgG1_PVA_/S267K
QVQVQESGPGLVKPSQTLSLTCTVSGYSITSDYAWNWIRQPPGKKLEWIGYISNKGSTSYNPSLKSRVTISRDTSKNQFSLKLSSVTAADTAVYYCARERNYDYDDYYYAMDYWGQGTLVTVSSASTKGPSVFPLAPSSKSTSGGTAALGCLVKDYFPEPVTVSWNSGALTSGVHTFPAVLQSSGLYSLSSVVTVPSSSLGTQTYICNVNHKPSNTKVDKKVEPKSCDKTHTCPPCPAPPVAGPSVFLFPPKPKDTLMISRTPEVTCVVVDVKHEDPEVKFNWYVDGVEVHNAKTKPREEQYNSTYRVVSVLTVLHQDWLNGKEYKCKVSNKALPAPIEKTISKAKGQPREPQVYTLPPSREEMTKNQVSLTCLVKGFYPSDIAVEWESNGQPENNYKTTPPVLDSDGSFFLYSKLTVDKSRWQQGNVFSCSVMHEALHNHYTQKSLSLSPGK

SEQ ID NO: 909 - protein, 220 aa, synthetic construct; identical to SEQ ID NO: 484
  source 1..220: note = XENP45683 Chain 2- STEAP-A[STEAP1]_L1_Light Chain

SEQ ID NO: 910 - protein, 453 aa, synthetic construct
  source 1..453: note = XENP45684 Chain 1- STEAP-A[STEAP1]_H1.91_IgG1_PVA_/S267K
QVQVQESGPGLVKPSQTLSLTCTVSGYSITSDYAWNWIRQPPGKKLEWIGYISNQGSTSYNPSLKSRVTISRDTSKNQFSLKLSSVTAADTAVYYCARERNYDYDDYYYAMDYWGQGTLVTVSSASTKGPSVFPLAPSSKSTSGGTAALGCLVKDYFPEPVTVSWNSGALTSGVHTFPAVLQSSGLYSLSSVVTVPSSSLGTQTYICNVNHKPSNTKVDKKVEPKSCDKTHTCPPCPAPPVAGPSVFLFPPKPKDTLMISRTPEVTCVVVDVKHEDPEVKFNWYVDGVEVHNAKTKPREEQYNSTYRVVSVLTVLHQDWLNGKEYKCKVSNKALPAPIEKTISKAKGQPREPQVYTLPPSREEMTKNQVSLTCLVKGFYPSDIAVEWESNGQPENNYKTTPPVLDSDGSFFLYSKLTVDKSRWQQGNVFSCSVMHEALHNHYTQKSLSLSPGK

SEQ ID NO: 911 - protein, 220 aa, synthetic construct; identical to SEQ ID NO: 484
  source 1..220: note = XENP45684 Chain 2- STEAP-A[STEAP1]_L1_Light Chain

SEQ ID NO: 912 - protein, 453 aa, synthetic construct
  source 1..453: note = XENP45685 Chain 1- STEAP-A[STEAP1]_H1.92_IgG1_PVA_/S267K
QVQVQESGPGLVKPSQTLSLTCTVSGYSITSDYAWNWIRQPPGKKLEWIGYISNTGSTSYNPSLKSRVTISRDTSKNQFSLKLSSVTAADTAVYYCARERNYDYDDYYYAMDYWGQGTLVTVSSASTKGPSVFPLAPSSKSTSGGTAALGCLVKDYFPEPVTVSWNSGALTSGVHTFPAVLQSSGLYSLSSVVTVPSSSLGTQTYICNVNHKPSNTKVDKKVEPKSCDKTHTCPPCPAPPVAGPSVFLFPPKPKDTLMISRTPEVTCVVVDVKHEDPEVKFNWYVDGVEVHNAKTKPREEQYNSTYRVVSVLTVLHQDWLNGKEYKCKVSNKALPAPIEKTISKAKGQPREPQVYTLPPSREEMTKNQVSLTCLVKGFYPSDIAVEWESNGQPENNYKTTPPVLDSDGSFFLYSKLTVDKSRWQQGNVFSCSVMHEALHNHYTQKSLSLSPGK

SEQ ID NO: 913 - protein, 220 aa, synthetic construct; identical to SEQ ID NO: 484
  source 1..220: note = XENP45685 Chain 2- STEAP-A[STEAP1]_L1_Light Chain

SEQ ID NO: 914 - protein, 453 aa, synthetic construct
  source 1..453: note = XENP45686 Chain 1- STEAP-A[STEAP1]_H1.93_IgG1_PVA_/S267K
QVQVQESGPGLVKPSQTLSLTCTVSGYSITSDYAWNWIRQPPGKKLEWIGYISNYGSTSYNPSLKSRVTISRDTSKNQFSLKLSSVTAADTAVYYCARERNYDYDDYYYAMDYWGQGTLVTVSSASTKGPSVFPLAPSSKSTSGGTAALGCLVKDYFPEPVTVSWNSGALTSGVHTFPAVLQSSGLYSLSSVVTVPSSSLGTQTYICNVNHKPSNTKVDKKVEPKSCDKTHTCPPCPAPPVAGPSVFLFPPKPKDTLMISRTPEVTCVVVDVKHEDPEVKFNWYVDGVEVHNAKTKPREEQYNSTYRVVSVLTVLHQDWLNGKEYKCKVSNKALPAPIEKTISKAKGQPREPQVYTLPPSREEMTKNQVSLTCLVKGFYPSDIAVEWESNGQPENNYKTTPPVLDSDGSFFLYSKLTVDKSRWQQGNVFSCSVMHEALHNHYTQKSLSLSPGK

SEQ ID NO: 915 - protein, 220 aa, synthetic construct; identical to SEQ ID NO: 484
  source 1..220: note = XENP45686 Chain 2- STEAP-A[STEAP1]_L1_Light Chain

SEQ ID NO: 916 - protein, 453 aa, synthetic construct
  source 1..453: note = XENP45687 Chain 1- STEAP-A[STEAP1]_H1.94_IgG1_PVA_/S267K
QVQVQESGPGLVKPSQTLSLTCTVSGYSITSDYAWNWIRQPPGKKLEWIGYISNSASTSYNPSLKSRVTISRDTSKNQFSLKLSSVTAADTAVYYCARERNYDYDDYYYAMDYWGQGTLVTVSSASTKGPSVFPLAPSSKSTSGGTAALGCLVKDYFPEPVTVSWNSGALTSGVHTFPAVLQSSGLYSLSSVVTVPSSSLGTQTYICNVNHKPSNTKVDKKVEPKSCDKTHTCPPCPAPPVAGPSVFLFPPKPKDTLMISRTPEVTCVVVDVKHEDPEVKFNWYVDGVEVHNAKTKPREEQYNSTYRVVSVLTVLHQDWLNGKEYKCKVSNKALPAPIEKTISKAKGQPREPQVYTLPPSREEMTKNQVSLTCLVKGFYPSDIAVEWESNGQPENNYKTTPPVLDSDGSFFLYSKLTVDKSRWQQGNVFSCSVMHEALHNHYTQKSLSLSPGK

SEQ ID NO: 917 - protein, 220 aa, synthetic construct; identical to SEQ ID NO: 484
  source 1..220: note = XENP45687 Chain 2- STEAP-A[STEAP1]_L1_Light Chain

SEQ ID NO: 918 - protein, 453 aa, synthetic construct
  source 1..453: note = XENP45688 Chain 1- STEAP-A[STEAP1]_H1.95_IgG1_PVA_/S267K
QVQVQESGPGLVKPSQTLSLTCTVSGYSITSDYAWNWIRQPPGKKLEWIGYISNSESTSYNPSLKSRVTISRDTSKNQFSLKLSSVTAADTAVYYCARERNYDYDDYYYAMDYWGQGTLVTVSSASTKGPSVFPLAPSSKSTSGGTAALGCLVKDYFPEPVTVSWNSGALTSGVHTFPAVLQSSGLYSLSSVVTVPSSSLGTQTYICNVNHKPSNTKVDKKVEPKSCDKTHTCPPCPAPPVAGPSVFLFPPKPKDTLMISRTPEVTCVVVDVKHEDPEVKFNWYVDGVEVHNAKTKPREEQYNSTYRVVSVLTVLHQDWLNGKEYKCKVSNKALPAPIEKTISKAKGQPREPQVYTLPPSREEMTKNQVSLTCLVKGFYPSDIAVEWESNGQPENNYKTTPPVLDSDGSFFLYSKLTVDKSRWQQGNVFSCSVMHEALHNHYTQKSLSLSPGK

SEQ ID NO: 919 - protein, 220 aa, synthetic construct; identical to SEQ ID NO: 484
  source 1..220: note = XENP45688 Chain 2- STEAP-A[STEAP1]_L1_Light Chain

SEQ ID NO: 920 - protein, 453 aa, synthetic construct
  source 1..453: note = XENP45689 Chain 1- STEAP-A[STEAP1]_H1.96_IgG1_PVA_/S267K
QVQVQESGPGLVKPSQTLSLTCTVSGYSITSDYAWNWIRQPPGKKLEWIGYISNSHSTSYNPSLKSRVTISRDTSKNQFSLKLSSVTAADTAVYYCARERNYDYDDYYYAMDYWGQGTLVTVSSASTKGPSVFPLAPSSKSTSGGTAALGCLVKDYFPEPVTVSWNSGALTSGVHTFPAVLQSSGLYSLSSVVTVPSSSLGTQTYICNVNHKPSNTKVDKKVEPKSCDKTHTCPPCPAPPVAGPSVFLFPPKPKDTLMISRTPEVTCVVVDVKHEDPEVKFNWYVDGVEVHNAKTKPREEQYNSTYRVVSVLTVLHQDWLNGKEYKCKVSNKALPAPIEKTISKAKGQPREPQVYTLPPSREEMTKNQVSLTCLVKGFYPSDIAVEWESNGQPENNYKTTPPVLDSDGSFFLYSKLTVDKSRWQQGNVFSCSVMHEALHNHYTQKSLSLSPGK

SEQ ID NO: 921 - protein, 220 aa, synthetic construct; identical to SEQ ID NO: 484
  source 1..220: note = XENP45689 Chain 2- STEAP-A[STEAP1]_L1_Light Chain

SEQ ID NO: 922 - protein, 453 aa, synthetic construct
  source 1..453: note = XENP45690 Chain 1- STEAP-A[STEAP1]_H1.97_IgG1_PVA_/S267K
QVQVQESGPGLVKPSQTLSLTCTVSGYSITSDYAWNWIRQPPGKKLEWIGYISNSQSTSYNPSLKSRVTISRDTSKNQFSLKLSSVTAADTAVYYCARERNYDYDDYYYAMDYWGQGTLVTVSSASTKGPSVFPLAPSSKSTSGGTAALGCLVKDYFPEPVTVSWNSGALTSGVHTFPAVLQSSGLYSLSSVVTVPSSSLGTQTYICNVNHKPSNTKVDKKVEPKSCDKTHTCPPCPAPPVAGPSVFLFPPKPKDTLMISRTPEVTCVVVDVKHEDPEVKFNWYVDGVEVHNAKTKPREEQYNSTYRVVSVLTVLHQDWLNGKEYKCKVSNKALPAPIEKTISKAKGQPREPQVYTLPPSREEMTKNQVSLTCLVKGFYPSDIAVEWESNGQPENNYKTTPPVLDSDGSFFLYSKLTVDKSRWQQGNVFSCSVMHEALHNHYTQKSLSLSPGK

SEQ ID NO: 923 - protein, 220 aa, synthetic construct; identical to SEQ ID NO: 484
  source 1..220: note = XENP45690 Chain 2- STEAP-A[STEAP1]_L1_Light Chain

SEQ ID NO: 924 - protein, 453 aa, synthetic construct
  source 1..453: note = XENP45691 Chain 1- STEAP-A[STEAP1]_H1.98_IgG1_PVA_/S267K
QVQVQESGPGLVKPSQTLSLTCTVSGYSITSDYAWNWIRQPPGKKLEWIGYISNSRSTSYNPSLKSRVTISRDTSKNQFSLKLSSVTAADTAVYYCARERNYDYDDYYYAMDYWGQGTLVTVSSASTKGPSVFPLAPSSKSTSGGTAALGCLVKDYFPEPVTVSWNSGALTSGVHTFPAVLQSSGLYSLSSVVTVPSSSLGTQTYICNVNHKPSNTKVDKKVEPKSCDKTHTCPPCPAPPVAGPSVFLFPPKPKDTLMISRTPEVTCVVVDVKHEDPEVKFNWYVDGVEVHNAKTKPREEQYNSTYRVVSVLTVLHQDWLNGKEYKCKVSNKALPAPIEKTISKAKGQPREPQVYTLPPSREEMTKNQVSLTCLVKGFYPSDIAVEWESNGQPENNYKTTPPVLDSDGSFFLYSKLTVDKSRWQQGNVFSCSVMHEALHNHYTQKSLSLSPGK

SEQ ID NO: 925 - protein, 220 aa, synthetic construct; identical to SEQ ID NO: 484
  source 1..220: note = XENP45691 Chain 2- STEAP-A[STEAP1]_L1_Light Chain

SEQ ID NO: 926 - protein, 453 aa, synthetic construct
  source 1..453: note = XENP45692 Chain 1- STEAP-A[STEAP1]_H1.99_IgG1_PVA_/S267K
QVQVQESGPGLVKPSQTLSLTCTVSGYSITSDYAWNWIRQPPGKKLEWIGYISNSGATSYNPSLKSRVTISRDTSKNQFSLKLSSVTAADTAVYYCARERNYDYDDYYYAMDYWGQGTLVTVSSASTKGPSVFPLAPSSKSTSGGTAALGCLVKDYFPEPVTVSWNSGALTSGVHTFPAVLQSSGLYSLSSVVTVPSSSLGTQTYICNVNHKPSNTKVDKKVEPKSCDKTHTCPPCPAPPVAGPSVFLFPPKPKDTLMISRTPEVTCVVVDVKHEDPEVKFNWYVDGVEVHNAKTKPREEQYNSTYRVVSVLTVLHQDWLNGKEYKCKVSNKALPAPIEKTISKAKGQPREPQVYTLPPSREEMTKNQVSLTCLVKGFYPSDIAVEWESNGQPENNYKTTPPVLDSDGSFFLYSKLTVDKSRWQQGNVFSCSVMHEALHNHYTQKSLSLSPGK

SEQ ID NO: 927 - protein, 220 aa, synthetic construct; identical to SEQ ID NO: 484
  source 1..220: note = XENP45692 Chain 2- STEAP-A[STEAP1]_L1_Light Chain

SEQ ID NO: 928 - protein, 453 aa, synthetic construct
  source 1..453: note = XENP45693 Chain 1- STEAP-A[STEAP1]_H1.100_IgG1_PVA_/S267K
QVQVQESGPGLVKPSQTLSLTCTVSGYSITSDYAWNWIRQPPGKKLEWIGYISNSGDTSYNPSLKSRVTISRDTSKNQFSLKLSSVTAADTAVYYCARERNYDYDDYYYAMDYWGQGTLVTVSSASTKGPSVFPLAPSSKSTSGGTAALGCLVKDYFPEPVTVSWNSGALTSGVHTFPAVLQSSGLYSLSSVVTVPSSSLGTQTYICNVNHKPSNTKVDKKVEPKSCDKTHTCPPCPAPPVAGPSVFLFPPKPKDTLMISRTPEVTCVVVDVKHEDPEVKFNWYVDGVEVHNAKTKPREEQYNSTYRVVSVLTVLHQDWLNGKEYKCKVSNKALPAPIEKTISKAKGQPREPQVYTLPPSREEMTKNQVSLTCLVKGFYPSDIAVEWESNGQPENNYKTTPPVLDSDGSFFLYSKLTVDKSRWQQGNVFSCSVMHEALHNHYTQKSLSLSPGK

SEQ ID NO: 929 - protein, 220 aa, synthetic construct; identical to SEQ ID NO: 484
  source 1..220: note = XENP45693 Chain 2- STEAP-A[STEAP1]_L1_Light Chain

SEQ ID NO: 930 - protein, 453 aa, synthetic construct
  source 1..453: note = XENP45694 Chain 1- STEAP-A[STEAP1]_H1.101_IgG1_PVA_/S267K
QVQVQESGPGLVKPSQTLSLTCTVSGYSITSDYAWNWIRQPPGKKLEWIGYISNSGGTSYNPSLKSRVTISRDTSKNQFSLKLSSVTAADTAVYYCARERNYDYDDYYYAMDYWGQGTLVTVSSASTKGPSVFPLAPSSKSTSGGTAALGCLVKDYFPEPVTVSWNSGALTSGVHTFPAVLQSSGLYSLSSVVTVPSSSLGTQTYICNVNHKPSNTKVDKKVEPKSCDKTHTCPPCPAPPVAGPSVFLFPPKPKDTLMISRTPEVTCVVVDVKHEDPEVKFNWYVDGVEVHNAKTKPREEQYNSTYRVVSVLTVLHQDWLNGKEYKCKVSNKALPAPIEKTISKAKGQPREPQVYTLPPSREEMTKNQVSLTCLVKGFYPSDIAVEWESNGQPENNYKTTPPVLDSDGSFFLYSKLTVDKSRWQQGNVFSCSVMHEALHNHYTQKSLSLSPGK

SEQ ID NO: 931 - protein, 220 aa, synthetic construct; identical to SEQ ID NO: 484
  source 1..220: note = XENP45694 Chain 2- STEAP-A[STEAP1]_L1_Light Chain

SEQ ID NO: 932 - protein, 453 aa, synthetic construct
  source 1..453: note = XENP45695 Chain 1- STEAP-A[STEAP1]_H1.102_IgG1_PVA_/S267K
QVQVQESGPGLVKPSQTLSLTCTVSGYSITSDYAWNWIRQPPGKKLEWIGYISNSGHTSYNPSLKSRVTISRDTSKNQFSLKLSSVTAADTAVYYCARERNYDYDDYYYAMDYWGQGTLVTVSSASTKGPSVFPLAPSSKSTSGGTAALGCLVKDYFPEPVTVSWNSGALTSGVHTFPAVLQSSGLYSLSSVVTVPSSSLGTQTYICNVNHKPSNTKVDKKVEPKSCDKTHTCPPCPAPPVAGPSVFLFPPKPKDTLMISRTPEVTCVVVDVKHEDPEVKFNWYVDGVEVHNAKTKPREEQYNSTYRVVSVLTVLHQDWLNGKEYKCKVSNKALPAPIEKTISKAKGQPREPQVYTLPPSREEMTKNQVSLTCLVKGFYPSDIAVEWESNGQPENNYKTTPPVLDSDGSFFLYSKLTVDKSRWQQGNVFSCSVMHEALHNHYTQKSLSLSPGK

SEQ ID NO: 933 - protein, 220 aa, synthetic construct; identical to SEQ ID NO: 484
  source 1..220: note = XENP45695 Chain 2- STEAP-A[STEAP1]_L1_Light Chain

SEQ ID NO: 934 - protein, 453 aa, synthetic construct
  source 1..453: note = XENP45696 Chain 1- STEAP-A[STEAP1]_H1.102_IgG1_PVA_/S267K
QVQVQESGPGLVKPSQTLSLTCTVSGYSITSDYAWNWIRQPPGKKLEWIGYISNSGKTSYNPSLKSRVTISRDTSKNQFSLKLSSVTAADTAVYYCARERNYDYDDYYYAMDYWGQGTLVTVSSASTKGPSVFPLAPSSKSTSGGTAALGCLVKDYFPEPVTVSWNSGALTSGVHTFPAVLQSSGLYSLSSVVTVPSSSLGTQTYICNVNHKPSNTKVDKKVEPKSCDKTHTCPPCPAPPVAGPSVFLFPPKPKDTLMISRTPEVTCVVVDVKHEDPEVKFNWYVDGVEVHNAKTKPREEQYNSTYRVVSVLTVLHQDWLNGKEYKCKVSNKALPAPIEKTISKAKGQPREPQVYTLPPSREEMTKNQVSLTCLVKGFYPSDIAVEWESNGQPENNYKTTPPVLDSDGSFFLYSKLTVDKSRWQQGNVFSCSVMHEALHNHYTQKSLSLSPGK

SEQ ID NO: 935 - protein, 220 aa, synthetic construct; identical to SEQ ID NO: 484
  source 1..220: note = XENP45696 Chain 2- STEAP-A[STEAP1]_L1_Light Chain

SEQ ID NO: 936 - protein, 453 aa, synthetic construct
  source 1..453: note = XENP45697 Chain 1- STEAP-A[STEAP1]_H1.104_IgG1_PVA_/S267K
QVQVQESGPGLVKPSQTLSLTCTVSGYSITSDYAWNWIRQPPGKKLEWIGYISNSGQTSYNPSLKSRVTISRDTSKNQFSLKLSSVTAADTAVYYCARERNYDYDDYYYAMDYWGQGTLVTVSSASTKGPSVFPLAPSSKSTSGGTAALGCLVKDYFPEPVTVSWNSGALTSGVHTFPAVLQSSGLYSLSSVVTVPSSSLGTQTYICNVNHKPSNTKVDKKVEPKSCDKTHTCPPCPAPPVAGPSVFLFPPKPKDTLMISRTPEVTCVVVDVKHEDPEVKFNWYVDGVEVHNAKTKPREEQYNSTYRVVSVLTVLHQDWLNGKEYKCKVSNKALPAPIEKTISKAKGQPREPQVYTLPPSREEMTKNQVSLTCLVKGFYPSDIAVEWESNGQPENNYKTTPPVLDSDGSFFLYSKLTVDKSRWQQGNVFSCSVMHEALHNHYTQKSLSLSPGK

SEQ ID NO: 937 - protein, 220 aa, synthetic construct; identical to SEQ ID NO: 484
  source 1..220: note = XENP45697 Chain 2- STEAP-A[STEAP1]_L1_Light Chain

SEQ ID NO: 938 - protein, 453 aa, synthetic construct
  source 1..453: note = XENP45698 Chain 1- STEAP-A[STEAP1]_H1.105_IgG1_PVA_/S267K
QVQVQESGPGLVKPSQTLSLTCTVSGYSITSDYAWNWIRQPPGKKLEWIGYISNSGTTSYNPSLKSRVTISRDTSKNQFSLKLSSVTAADTAVYYCARERNYDYDDYYYAMDYWGQGTLVTVSSASTKGPSVFPLAPSSKSTSGGTAALGCLVKDYFPEPVTVSWNSGALTSGVHTFPAVLQSSGLYSLSSVVTVPSSSLGTQTYICNVNHKPSNTKVDKKVEPKSCDKTHTCPPCPAPPVAGPSVFLFPPKPKDTLMISRTPEVTCVVVDVKHEDPEVKFNWYVDGVEVHNAKTKPREEQYNSTYRVVSVLTVLHQDWLNGKEYKCKVSNKALPAPIEKTISKAKGQPREPQVYTLPPSREEMTKNQVSLTCLVKGFYPSDIAVEWESNGQPENNYKTTPPVLDSDGSFFLYSKLTVDKSRWQQGNVFSCSVMHEALHNHYTQKSLSLSPGK

SEQ ID NO: 939 - protein, 220 aa, synthetic construct; identical to SEQ ID NO: 484
  source 1..220: note = XENP45698 Chain 2- STEAP-A[STEAP1]_L1_Light Chain

SEQ ID NO: 940 - protein, 453 aa, synthetic construct
  source 1..453: note = XENP45699 Chain 1- STEAP-A[STEAP1]_H1.106_IgG1_PVA_/S267K
QVQVQESGPGLVKPSQTLSLTCTVSGYSITSDYAWNWIRQPPGKKLEWIGYISNSGVTSYNPSLKSRVTISRDTSKNQFSLKLSSVTAADTAVYYCARERNYDYDDYYYAMDYWGQGTLVTVSSASTKGPSVFPLAPSSKSTSGGTAALGCLVKDYFPEPVTVSWNSGALTSGVHTFPAVLQSSGLYSLSSVVTVPSSSLGTQTYICNVNHKPSNTKVDKKVEPKSCDKTHTCPPCPAPPVAGPSVFLFPPKPKDTLMISRTPEVTCVVVDVKHEDPEVKFNWYVDGVEVHNAKTKPREEQYNSTYRVVSVLTVLHQDWLNGKEYKCKVSNKALPAPIEKTISKAKGQPREPQVYTLPPSREEMTKNQVSLTCLVKGFYPSDIAVEWESNGQPENNYKTTPPVLDSDGSFFLYSKLTVDKSRWQQGNVFSCSVMHEALHNHYTQKSLSLSPGK

SEQ ID NO: 941 - protein, 220 aa, synthetic construct; identical to SEQ ID NO: 484
  source 1..220: note = XENP45699 Chain 2- STEAP-A[STEAP1]_L1_Light Chain

SEQ ID NO: 942 - protein, 453 aa, synthetic construct
  source 1..453: note = XENP45700 Chain 1- STEAP-A[STEAP1]_H1.107_IgG1_PVA_/S267K
QVQVQESGPGLVKPSQTLSLTCTVSGYSITSDYAWNWIRQPPGKKLEWIGYISNSGYTSYNPSLKSRVTISRDTSKNQFSLKLSSVTAADTAVYYCARERNYDYDDYYYAMDYWGQGTLVTVSSASTKGPSVFPLAPSSKSTSGGTAALGCLVKDYFPEPVTVSWNSGALTSGVHTFPAVLQSSGLYSLSSVVTVPSSSLGTQTYICNVNHKPSNTKVDKKVEPKSCDKTHTCPPCPAPPVAGPSVFLFPPKPKDTLMISRTPEVTCVVVDVKHEDPEVKFNWYVDGVEVHNAKTKPREEQYNSTYRVVSVLTVLHQDWLNGKEYKCKVSNKALPAPIEKTISKAKGQPREPQVYTLPPSREEMTKNQVSLTCLVKGFYPSDIAVEWESNGQPENNYKTTPPVLDSDGSFFLYSKLTVDKSRWQQGNVFSCSVMHEALHNHYTQKSLSLSPGK

SEQ ID NO: 943 - protein, 220 aa, synthetic construct; identical to SEQ ID NO: 484
  source 1..220: note = XENP45700 Chain 2- STEAP-A[STEAP1]_L1_Light Chain

SEQ ID NO: 944 - protein, 453 aa, synthetic construct
  source 1..453: note = XENP45701 Chain 1- STEAP-A[STEAP1]_H1.108_IgG1_PVA_/S267K
QVQVQESGPGLVKPSQTLSLTCTVSGYSITSDYAWNWIRQPPGKKLEWIGYISNSGSKSYNPSLKSRVTISRDTSKNQFSLKLSSVTAADTAVYYCARERNYDYDDYYYAMDYWGQGTLVTVSSASTKGPSVFPLAPSSKSTSGGTAALGCLVKDYFPEPVTVSWNSGALTSGVHTFPAVLQSSGLYSLSSVVTVPSSSLGTQTYICNVNHKPSNTKVDKKVEPKSCDKTHTCPPCPAPPVAGPSVFLFPPKPKDTLMISRTPEVTCVVVDVKHEDPEVKFNWYVDGVEVHNAKTKPREEQYNSTYRVVSVLTVLHQDWLNGKEYKCKVSNKALPAPIEKTISKAKGQPREPQVYTLPPSREEMTKNQVSLTCLVKGFYPSDIAVEWESNGQPENNYKTTPPVLDSDGSFFLYSKLTVDKSRWQQGNVFSCSVMHEALHNHYTQKSLSLSPGK

SEQ ID NO: 945 - protein, 220 aa, synthetic construct; identical to SEQ ID NO: 484
  source 1..220: note = XENP45701 Chain 2- STEAP-A[STEAP1]_L1_Light Chain

SEQ ID NO: 946 - protein, 453 aa, synthetic construct
  source 1..453: note = XENP45702 Chain 1- STEAP-A[STEAP1]_H1.109_IgG1_PVA_/S267K
QVQVQESGPGLVKPSQTLSLTCTVSGYSITSDYAWNWIRQPPGKKLEWIGYISNSGSTAYNPSLKSRVTISRDTSKNQFSLKLSSVTAADTAVYYCARERNYDYDDYYYAMDYWGQGTLVTVSSASTKGPSVFPLAPSSKSTSGGTAALGCLVKDYFPEPVTVSWNSGALTSGVHTFPAVLQSSGLYSLSSVVTVPSSSLGTQTYICNVNHKPSNTKVDKKVEPKSCDKTHTCPPCPAPPVAGPSVFLFPPKPKDTLMISRTPEVTCVVVDVKHEDPEVKFNWYVDGVEVHNAKTKPREEQYNSTYRVVSVLTVLHQDWLNGKEYKCKVSNKALPAPIEKTISKAKGQPREPQVYTLPPSREEMTKNQVSLTCLVKGFYPSDIAVEWESNGQPENNYKTTPPVLDSDGSFFLYSKLTVDKSRWQQGNVFSCSVMHEALHNHYTQKSLSLSPGK

SEQ ID NO: 947 - protein, 220 aa, synthetic construct; identical to SEQ ID NO: 484
  source 1..220: note = XENP45702 Chain 2- STEAP-A[STEAP1]_L1_Light Chain

SEQ ID NO: 948 - protein, 453 aa, synthetic construct
  source 1..453: note = XENP45703 Chain 1- STEAP-A[STEAP1]_H1.110_IgG1_PVA_/S267K
QVQVQESGPGLVKPSQTLSLTCTVSGYSITSDYAWNWIRQPPGKKLEWIGYISNSGSTDYNPSLKSRVTISRDTSKNQFSLKLSSVTAADTAVYYCARERNYDYDDYYYAMDYWGQGTLVTVSSASTKGPSVFPLAPSSKSTSGGTAALGCLVKDYFPEPVTVSWNSGALTSGVHTFPAVLQSSGLYSLSSVVTVPSSSLGTQTYICNVNHKPSNTKVDKKVEPKSCDKTHTCPPCPAPPVAGPSVFLFPPKPKDTLMISRTPEVTCVVVDVKHEDPEVKFNWYVDGVEVHNAKTKPREEQYNSTYRVVSVLTVLHQDWLNGKEYKCKVSNKALPAPIEKTISKAKGQPREPQVYTLPPSREEMTKNQVSLTCLVKGFYPSDIAVEWESNGQPENNYKTTPPVLDSDGSFFLYSKLTVDKSRWQQGNVFSCSVMHEALHNHYTQKSLSLSPGK

SEQ ID NO: 949 - protein, 220 aa, synthetic construct; identical to SEQ ID NO: 484
  source 1..220: note = XENP45703 Chain 2- STEAP-A[STEAP1]_L1_Light Chain

SEQ ID NO: 950 - protein, 453 aa, synthetic construct
  source 1..453: note = XENP45704 Chain 1- STEAP-A[STEAP1]_H1.111_IgG1_PVA_/S267K
QVQVQESGPGLVKPSQTLSLTCTVSGYSITSDYAWNWIRQPPGKKLEWIGYISNSGSTGYNPSLKSRVTISRDTSKNQFSLKLSSVTAADTAVYYCARERNYDYDDYYYAMDYWGQGTLVTVSSASTKGPSVFPLAPSSKSTSGGTAALGCLVKDYFPEPVTVSWNSGALTSGVHTFPAVLQSSGLYSLSSVVTVPSSSLGTQTYICNVNHKPSNTKVDKKVEPKSCDKTHTCPPCPAPPVAGPSVFLFPPKPKDTLMISRTPEVTCVVVDVKHEDPEVKFNWYVDGVEVHNAKTKPREEQYNSTYRVVSVLTVLHQDWLNGKEYKCKVSNKALPAPIEKTISKAKGQPREPQVYTLPPSREEMTKNQVSLTCLVKGFYPSDIAVEWESNGQPENNYKTTPPVLDSDGSFFLYSKLTVDKSRWQQGNVFSCSVMHEALHNHYTQKSLSLSPGK

SEQ ID NO: 951 - protein, 220 aa, synthetic construct; identical to SEQ ID NO: 484
  source 1..220: note = XENP45704 Chain 2- STEAP-A[STEAP1]_L1_Light Chain

SEQ ID NO: 952 - protein, 453 aa, synthetic construct
  source 1..453: note = XENP45705 Chain 1- STEAP-A[STEAP1]_H1.112_IgG1_PVA_/S267K
QVQVQESGPGLVKPSQTLSLTCTVSGYSITSDYAWNWIRQPPGKKLEWIGYISNSGSTHYNPSLKSRVTISRDTSKNQFSLKLSSVTAADTAVYYCARERNYDYDDYYYAMDYWGQGTLVTVSSASTKGPSVFPLAPSSKSTSGGTAALGCLVKDYFPEPVTVSWNSGALTSGVHTFPAVLQSSGLYSLSSVVTVPSSSLGTQTYICNVNHKPSNTKVDKKVEPKSCDKTHTCPPCPAPPVAGPSVFLFPPKPKDTLMISRTPEVTCVVVDVKHEDPEVKFNWYVDGVEVHNAKTKPREEQYNSTYRVVSVLTVLHQDWLNGKEYKCKVSNKALPAPIEKTISKAKGQPREPQVYTLPPSREEMTKNQVSLTCLVKGFYPSDIAVEWESNGQPENNYKTTPPVLDSDGSFFLYSKLTVDKSRWQQGNVFSCSVMHEALHNHYTQKSLSLSPGK

SEQ ID NO: 953 - protein, 220 aa, synthetic construct; identical to SEQ ID NO: 484
  source 1..220: note = XENP45705 Chain 2- STEAP-A[STEAP1]_L1_Light Chain

SEQ ID NO: 954 - protein, 453 aa, synthetic construct
  source 1..453: note = XENP45706 Chain 1- STEAP-A[STEAP1]_H1.113_IgG1_PVA_/S267K
QVQVQESGPGLVKPSQTLSLTCTVSGYSITSDYAWNWIRQPPGKKLEWIGYISNSGSTQYNPSLKSRVTISRDTSKNQFSLKLSSVTAADTAVYYCARERNYDYDDYYYAMDYWGQGTLVTVSSASTKGPSVFPLAPSSKSTSGGTAALGCLVKDYFPEPVTVSWNSGALTSGVHTFPAVLQSSGLYSLSSVVTVPSSSLGTQTYICNVNHKPSNTKVDKKVEPKSCDKTHTCPPCPAPPVAGPSVFLFPPKPKDTLMISRTPEVTCVVVDVKHEDPEVKFNWYVDGVEVHNAKTKPREEQYNSTYRVVSVLTVLHQDWLNGKEYKCKVSNKALPAPIEKTISKAKGQPREPQVYTLPPSREEMTKNQVSLTCLVKGFYPSDIAVEWESNGQPENNYKTTPPVLDSDGSFFLYSKLTVDKSRWQQGNVFSCSVMHEALHNHYTQKSLSLSPGK

SEQ ID NO: 955 - protein, 220 aa, synthetic construct; identical to SEQ ID NO: 484
  source 1..220: note = XENP45706 Chain 2- STEAP-A[STEAP1]_L1_Light Chain

SEQ ID NO: 956 - protein, 453 aa, synthetic construct
  source 1..453: note = XENP45707 Chain 1- STEAP-A[STEAP1]_H1.114_IgG1_PVA_/S267K
QVQVQESGPGLVKPSQTLSLTCTVSGYSITSDYAWNWIRQPPGKKLEWIGYISNSGSTTYNPSLKSRVTISRDTSKNQFSLKLSSVTAADTAVYYCARERNYDYDDYYYAMDYWGQGTLVTVSSASTKGPSVFPLAPSSKSTSGGTAALGCLVKDYFPEPVTVSWNSGALTSGVHTFPAVLQSSGLYSLSSVVTVPSSSLGTQTYICNVNHKPSNTKVDKKVEPKSCDKTHTCPPCPAPPVAGPSVFLFPPKPKDTLMISRTPEVTCVVVDVKHEDPEVKFNWYVDGVEVHNAKTKPREEQYNSTYRVVSVLTVLHQDWLNGKEYKCKVSNKALPAPIEKTISKAKGQPREPQVYTLPPSREEMTKNQVSLTCLVKGFYPSDIAVEWESNGQPENNYKTTPPVLDSDGSFFLYSKLTVDKSRWQQGNVFSCSVMHEALHNHYTQKSLSLSPGK

SEQ ID NO: 957 - protein, 220 aa, synthetic construct; identical to SEQ ID NO: 484
  source 1..220: note = XENP45707 Chain 2- STEAP-A[STEAP1]_L1_Light Chain

SEQ ID NO: 958 - protein, 453 aa, synthetic construct
  source 1..453: note = XENP45708 Chain 1- STEAP-A[STEAP1]_H1.115_IgG1_PVA_/S267K
QVQVQESGPGLVKPSQTLSLTCTVSGYSITSDYAWNWIRQPPGKKLEWIGYISNSGSTVYNPSLKSRVTISRDTSKNQFSLKLSSVTAADTAVYYCARERNYDYDDYYYAMDYWGQGTLVTVSSASTKGPSVFPLAPSSKSTSGGTAALGCLVKDYFPEPVTVSWNSGALTSGVHTFPAVLQSSGLYSLSSVVTVPSSSLGTQTYICNVNHKPSNTKVDKKVEPKSCDKTHTCPPCPAPPVAGPSVFLFPPKPKDTLMISRTPEVTCVVVDVKHEDPEVKFNWYVDGVEVHNAKTKPREEQYNSTYRVVSVLTVLHQDWLNGKEYKCKVSNKALPAPIEKTISKAKGQPREPQVYTLPPSREEMTKNQVSLTCLVKGFYPSDIAVEWESNGQPENNYKTTPPVLDSDGSFFLYSKLTVDKSRWQQGNVFSCSVMHEALHNHYTQKSLSLSPGK

SEQ ID NO: 959 - protein, 220 aa, synthetic construct; identical to SEQ ID NO: 484
  source 1..220: note = XENP45708 Chain 2- STEAP-A[STEAP1]_L1_Light Chain

SEQ ID NO: 960 - protein, 453 aa, synthetic construct
  source 1..453: note = XENP45709 Chain 1- STEAP-A[STEAP1]_H1.116_IgG1_PVA_/S267K
QVQVQESGPGLVKPSQTLSLTCTVSGYSITSDYAWNWIRQPPGKKLEWIGYISNSGSTYYNPSLKSRVTISRDTSKNQFSLKLSSVTAADTAVYYCARERNYDYDDYYYAMDYWGQGTLVTVSSASTKGPSVFPLAPSSKSTSGGTAALGCLVKDYFPEPVTVSWNSGALTSGVHTFPAVLQSSGLYSLSSVVTVPSSSLGTQTYICNVNHKPSNTKVDKKVEPKSCDKTHTCPPCPAPPVAGPSVFLFPPKPKDTLMISRTPEVTCVVVDVKHEDPEVKFNWYVDGVEVHNAKTKPREEQYNSTYRVVSVLTVLHQDWLNGKEYKCKVSNKALPAPIEKTISKAKGQPREPQVYTLPPSREEMTKNQVSLTCLVKGFYPSDIAVEWESNGQPENNYKTTPPVLDSDGSFFLYSKLTVDKSRWQQGNVFSCSVMHEALHNHYTQKSLSLSPGK

SEQ ID NO: 961 - protein, 220 aa, synthetic construct; identical to SEQ ID NO: 484
  source 1..220: note = XENP45709 Chain 2- STEAP-A[STEAP1]_L1_Light Chain

SEQ ID NO: 962 - protein, 453 aa, synthetic construct
  source 1..453: note = XENP45710 Chain 1- STEAP-A[STEAP1]_H1.117_IgG1_PVA_/S267K
QVQVQESGPGLVKPSQTLSLTCTVSGYSITSDYAWNWIRQPPGKKLEWIGYISNSGSTSYNPSLKSRVTISRDTSKNQFSLKLSSVTAADTAVYYCARHRNYDYDDYYYAMDYWGQGTLVTVSSASTKGPSVFPLAPSSKSTSGGTAALGCLVKDYFPEPVTVSWNSGALTSGVHTFPAVLQSSGLYSLSSVVTVPSSSLGTQTYICNVNHKPSNTKVDKKVEPKSCDKTHTCPPCPAPPVAGPSVFLFPPKPKDTLMISRTPEVTCVVVDVKHEDPEVKFNWYVDGVEVHNAKTKPREEQYNSTYRVVSVLTVLHQDWLNGKEYKCKVSNKALPAPIEKTISKAKGQPREPQVYTLPPSREEMTKNQVSLTCLVKGFYPSDIAVEWESNGQPENNYKTTPPVLDSDGSFFLYSKLTVDKSRWQQGNVFSCSVMHEALHNHYTQKSLSLSPGK

SEQ ID NO: 963 - protein, 220 aa, synthetic construct; identical to SEQ ID NO: 484
  source 1..220: note = XENP45710 Chain 2- STEAP-A[STEAP1]_L1_Light Chain

SEQ ID NO: 964 - protein, 453 aa, synthetic construct
  source 1..453: note = XENP45711 Chain 1- STEAP-A[STEAP1]_H1.118_IgG1_PVA_/S267K
QVQVQESGPGLVKPSQTLSLTCTVSGYSITSDYAWNWIRQPPGKKLEWIGYISNSGSTSYNPSLKSRVTISRDTSKNQFSLKLSSVTAADTAVYYCARIRNYDYDDYYYAMDYWGQGTLVTVSSASTKGPSVFPLAPSSKSTSGGTAALGCLVKDYFPEPVTVSWNSGALTSGVHTFPAVLQSSGLYSLSSVVTVPSSSLGTQTYICNVNHKPSNTKVDKKVEPKSCDKTHTCPPCPAPPVAGPSVFLFPPKPKDTLMISRTPEVTCVVVDVKHEDPEVKFNWYVDGVEVHNAKTKPREEQYNSTYRVVSVLTVLHQDWLNGKEYKCKVSNKALPAPIEKTISKAKGQPREPQVYTLPPSREEMTKNQVSLTCLVKGFYPSDIAVEWESNGQPENNYKTTPPVLDSDGSFFLYSKLTVDKSRWQQGNVFSCSVMHEALHNHYTQKSLSLSPGK

SEQ ID NO: 965 - protein, 220 aa, synthetic construct; identical to SEQ ID NO: 484
  source 1..220: note = XENP45711 Chain 2- STEAP-A[STEAP1]_L1_Light Chain

SEQ ID NO: 966 - protein, 453 aa, synthetic construct
  source 1..453: note = XENP45712 Chain 1- STEAP-A[STEAP1]_H1.119_IgG1_PVA_/S267K
QVQVQESGPGLVKPSQTLSLTCTVSGYSITSDYAWNWIRQPPGKKLEWIGYISNSGSTSYNPSLKSRVTISRDTSKNQFSLKLSSVTAADTAVYYCARKRNYDYDDYYYAMDYWGQGTLVTVSSASTKGPSVFPLAPSSKSTSGGTAALGCLVKDYFPEPVTVSWNSGALTSGVHTFPAVLQSSGLYSLSSVVTVPSSSLGTQTYICNVNHKPSNTKVDKKVEPKSCDKTHTCPPCPAPPVAGPSVFLFPPKPKDTLMISRTPEVTCVVVDVKHEDPEVKFNWYVDGVEVHNAKTKPREEQYNSTYRVVSVLTVLHQDWLNGKEYKCKVSNKALPAPIEKTISKAKGQPREPQVYTLPPSREEMTKNQVSLTCLVKGFYPSDIAVEWESNGQPENNYKTTPPVLDSDGSFFLYSKLTVDKSRWQQGNVFSCSVMHEALHNHYTQKSLSLSPGK

SEQ ID NO: 967 - protein, 220 aa, synthetic construct; identical to SEQ ID NO: 484
  source 1..220: note = XENP45712 Chain 2- STEAP-A[STEAP1]_L1_Light Chain

SEQ ID NO: 968 - protein, 453 aa, synthetic construct
  source 1..453: note = XENP45713 Chain 1- STEAP-A[STEAP1]_H1.120_IgG1_PVA_/S267K
QVQVQESGPGLVKPSQTLSLTCTVSGYSITSDYAWNWIRQPPGKKLEWIGYISNSGSTSYNPSLKSRVTISRDTSKNQFSLKLSSVTAADTAVYYCARQRNYDYDDYYYAMDYWGQGTLVTVSSASTKGPSVFPLAPSSKSTSGGTAALGCLVKDYFPEPVTVSWNSGALTSGVHTFPAVLQSSGLYSLSSVVTVPSSSLGTQTYICNVNHKPSNTKVDKKVEPKSCDKTHTCPPCPAPPVAGPSVFLFPPKPKDTLMISRTPEVTCVVVDVKHEDPEVKFNWYVDGVEVHNAKTKPREEQYNSTYRVVSVLTVLHQDWLNGKEYKCKVSNKALPAPIEKTISKAKGQPREPQVYTLPPSREEMTKNQVSLTCLVKGFYPSDIAVEWESNGQPENNYKTTPPVLDSDGSFFLYSKLTVDKSRWQQGNVFSCSVMHEALHNHYTQKSLSLSPGK

SEQ ID NO: 969 - protein, 220 aa, synthetic construct; identical to SEQ ID NO: 484
  source 1..220: note = XENP45713 Chain 2- STEAP-A[STEAP1]_L1_Light Chain

SEQ ID NO: 970 - protein, 453 aa, synthetic construct
  source 1..453: note = XENP45714 Chain 1- STEAP-A[STEAP1]_H1.121_IgG1_PVA_/S267K
QVQVQESGPGLVKPSQTLSLTCTVSGYSITSDYAWNWIRQPPGKKLEWIGYISNSGSTSYNPSLKSRVTISRDTSKNQFSLKLSSVTAADTAVYYCARSRNYDYDDYYYAMDYWGQGTLVTVSSASTKGPSVFPLAPSSKSTSGGTAALGCLVKDYFPEPVTVSWNSGALTSGVHTFPAVLQSSGLYSLSSVVTVPSSSLGTQTYICNVNHKPSNTKVDKKVEPKSCDKTHTCPPCPAPPVAGPSVFLFPPKPKDTLMISRTPEVTCVVVDVKHEDPEVKFNWYVDGVEVHNAKTKPREEQYNSTYRVVSVLTVLHQDWLNGKEYKCKVSNKALPAPIEKTISKAKGQPREPQVYTLPPSREEMTKNQVSLTCLVKGFYPSDIAVEWESNGQPENNYKTTPPVLDSDGSFFLYSKLTVDKSRWQQGNVFSCSVMHEALHNHYTQKSLSLSPGK

SEQ ID NO: 971 - protein, 220 aa, synthetic construct; identical to SEQ ID NO: 484
  source 1..220: note = XENP45714 Chain 2- STEAP-A[STEAP1]_L1_Light Chain

SEQ ID NO: 972 - protein, 453 aa, synthetic construct
  source 1..453: note = XENP45715 Chain 1- STEAP-A[STEAP1]_H1.122_IgG1_PVA_/S267K
QVQVQESGPGLVKPSQTLSLTCTVSGYSITSDYAWNWIRQPPGKKLEWIGYISNSGSTSYNPSLKSRVTISRDTSKNQFSLKLSSVTAADTAVYYCAREENYDYDDYYYAMDYWGQGTLVTVSSASTKGPSVFPLAPSSKSTSGGTAALGCLVKDYFPEPVTVSWNSGALTSGVHTFPAVLQSSGLYSLSSVVTVPSSSLGTQTYICNVNHKPSNTKVDKKVEPKSCDKTHTCPPCPAPPVAGPSVFLFPPKPKDTLMISRTPEVTCVVVDVKHEDPEVKFNWYVDGVEVHNAKTKPREEQYNSTYRVVSVLTVLHQDWLNGKEYKCKVSNKALPAPIEKTISKAKGQPREPQVYTLPPSREEMTKNQVSLTCLVKGFYPSDIAVEWESNGQPENNYKTTPPVLDSDGSFFLYSKLTVDKSRWQQGNVFSCSVMHEALHNHYTQKSLSLSPGK

SEQ ID NO: 973 - protein, 220 aa, synthetic construct; identical to SEQ ID NO: 484
  source 1..220: note = XENP45715 Chain 2- STEAP-A[STEAP1]_L1_Light Chain

SEQ ID NO: 974 - protein, 453 aa, synthetic construct
  source 1..453: note = XENP45716 Chain 1- STEAP-A[STEAP1]_H1.123_IgG1_PVA_/S267K
QVQVQESGPGLVKPSQTLSLTCTVSGYSITSDYAWNWIRQPPGKKLEWIGYISNSGSTSYNPSLKSRVTISRDTSKNQFSLKLSSVTAADTAVYYCAREHNYDYDDYYYAMDYWGQGTLVTVSSASTKGPSVFPLAPSSKSTSGGTAALGCLVKDYFPEPVTVSWNSGALTSGVHTFPAVLQSSGLYSLSSVVTVPSSSLGTQTYICNVNHKPSNTKVDKKVEPKSCDKTHTCPPCPAPPVAGPSVFLFPPKPKDTLMISRTPEVTCVVVDVKHEDPEVKFNWYVDGVEVHNAKTKPREEQYNSTYRVVSVLTVLHQDWLNGKEYKCKVSNKALPAPIEKTISKAKGQPREPQVYTLPPSREEMTKNQVSLTCLVKGFYPSDIAVEWESNGQPENNYKTTPPVLDSDGSFFLYSKLTVDKSRWQQGNVFSCSVMHEALHNHYTQKSLSLSPGK

SEQ ID NO: 975 - protein, 220 aa, synthetic construct; identical to SEQ ID NO: 484
  source 1..220: note = XENP45716 Chain 2- STEAP-A[STEAP1]_L1_Light Chain

SEQ ID NO: 976 - protein, 453 aa, synthetic construct
  source 1..453: note = XENP45717 Chain 1- STEAP-A[STEAP1]_H1.124_IgG1_PVA_/S267K
QVQVQESGPGLVKPSQTLSLTCTVSGYSITSDYAWNWIRQPPGKKLEWIGYISNSGSTSYNPSLKSRVTISRDTSKNQFSLKLSSVTAADTAVYYCAREINYDYDDYYYAMDYWGQGTLVTVSSASTKGPSVFPLAPSSKSTSGGTAALGCLVKDYFPEPVTVSWNSGALTSGVHTFPAVLQSSGLYSLSSVVTVPSSSLGTQTYICNVNHKPSNTKVDKKVEPKSCDKTHTCPPCPAPPVAGPSVFLFPPKPKDTLMISRTPEVTCVVVDVKHEDPEVKFNWYVDGVEVHNAKTKPREEQYNSTYRVVSVLTVLHQDWLNGKEYKCKVSNKALPAPIEKTISKAKGQPREPQVYTLPPSREEMTKNQVSLTCLVKGFYPSDIAVEWESNGQPENNYKTTPPVLDSDGSFFLYSKLTVDKSRWQQGNVFSCSVMHEALHNHYTQKSLSLSPGK

SEQ ID NO: 977 - protein, 220 aa, synthetic construct; identical to SEQ ID NO: 484
  source 1..220: note = XENP45717 Chain 2- STEAP-A[STEAP1]_L1_Light Chain

SEQ ID NO: 978 - protein, 453 aa, synthetic construct
  source 1..453: note = XENP45718 Chain 1- STEAP-A[STEAP1]_H1.125_IgG1_PVA_/S267K
QVQVQESGPGLVKPSQTLSLTCTVSGYSITSDYAWNWIRQPPGKKLEWIGYISNSGSTSYNPSLKSRVTISRDTSKNQFSLKLSSVTAADTAVYYCAREKNYDYDDYYYAMDYWGQGTLVTVSSASTKGPSVFPLAPSSKSTSGGTAALGCLVKDYFPEPVTVSWNSGALTSGVHTFPAVLQSSGLYSLSSVVTVPSSSLGTQTYICNVNHKPSNTKVDKKVEPKSCDKTHTCPPCPAPPVAGPSVFLFPPKPKDTLMISRTPEVTCVVVDVKHEDPEVKFNWYVDGVEVHNAKTKPREEQYNSTYRVVSVLTVLHQDWLNGKEYKCKVSNKALPAPIEKTISKAKGQPREPQVYTLPPSREEMTKNQVSLTCLVKGFYPSDIAVEWESNGQPENNYKTTPPVLDSDGSFFLYSKLTVDKSRWQQGNVFSCSVMHEALHNHYTQKSLSLSPGK

SEQ ID NO: 979 - protein, 220 aa, synthetic construct; identical to SEQ ID NO: 484
  source 1..220: note = XENP45718 Chain 2- STEAP-A[STEAP1]_L1_Light Chain

SEQ ID NO: 980 - protein, 453 aa, synthetic construct
  source 1..453: note = XENP45719 Chain 1- STEAP-A[STEAP1]_H1.126_IgG1_PVA_/S267K
QVQVQESGPGLVKPSQTLSLTCTVSGYSITSDYAWNWIRQPPGKKLEWIGYISNSGSTSYNPSLKSRVTISRDTSKNQFSLKLSSVTAADTAVYYCAREQNYDYDDYYYAMDYWGQGTLVTVSSASTKGPSVFPLAPSSKSTSGGTAALGCLVKDYFPEPVTVSWNSGALTSGVHTFPAVLQSSGLYSLSSVVTVPSSSLGTQTYICNVNHKPSNTKVDKKVEPKSCDKTHTCPPCPAPPVAGPSVFLFPPKPKDTLMISRTPEVTCVVVDVKHEDPEVKFNWYVDGVEVHNAKTKPREEQYNSTYRVVSVLTVLHQDWLNGKEYKCKVSNKALPAPIEKTISKAKGQPREPQVYTLPPSREEMTKNQVSLTCLVKGFYPSDIAVEWESNGQPENNYKTTPPVLDSDGSFFLYSKLTVDKSRWQQGNVFSCSVMHEALHNHYTQKSLSLSPGK

SEQ ID NO: 981 - protein, 220 aa, synthetic construct; identical to SEQ ID NO: 484
  source 1..220: note = XENP45719 Chain 2- STEAP-A[STEAP1]_L1_Light Chain

SEQ ID NO: 982 - protein, 453 aa, synthetic construct
  source 1..453: note = XENP45720 Chain 1- STEAP-A[STEAP1]_H1.127_IgG1_PVA_/S267K
QVQVQESGPGLVKPSQTLSLTCTVSGYSITSDYAWNWIRQPPGKKLEWIGYISNSGSTSYNPSLKSRVTISRDTSKNQFSLKLSSVTAADTAVYYCARERDYDYDDYYYAMDYWGQGTLVTVSSASTKGPSVFPLAPSSKSTSGGTAALGCLVKDYFPEPVTVSWNSGALTSGVHTFPAVLQSSGLYSLSSVVTVPSSSLGTQTYICNVNHKPSNTKVDKKVEPKSCDKTHTCPPCPAPPVAGPSVFLFPPKPKDTLMISRTPEVTCVVVDVKHEDPEVKFNWYVDGVEVHNAKTKPREEQYNSTYRVVSVLTVLHQDWLNGKEYKCKVSNKALPAPIEKTISKAKGQPREPQVYTLPPSREEMTKNQVSLTCLVKGFYPSDIAVEWESNGQPENNYKTTPPVLDSDGSFFLYSKLTVDKSRWQQGNVFSCSVMHEALHNHYTQKSLSLSPGK

SEQ ID NO: 983 - protein, 220 aa, synthetic construct; identical to SEQ ID NO: 484
  source 1..220: note = XENP45720 Chain 2- STEAP-A[STEAP1]_L1_Light Chain

SEQ ID NO: 984 - protein, 453 aa, synthetic construct
  source 1..453: note = XENP45721 Chain 1- STEAP-A[STEAP1]_H1.128_IgG1_PVA_/S267K
QVQVQESGPGLVKPSQTLSLTCTVSGYSITSDYAWNWIRQPPGKKLEWIGYISNSGSTSYNPSLKSRVTISRDTSKNQFSLKLSSVTAADTAVYYCARERGYDYDDYYYAMDYWGQGTLVTVSSASTKGPSVFPLAPSSKSTSGGTAALGCLVKDYFPEPVTVSWNSGALTSGVHTFPAVLQSSGLYSLSSVVTVPSSSLGTQTYICNVNHKPSNTKVDKKVEPKSCDKTHTCPPCPAPPVAGPSVFLFPPKPKDTLMISRTPEVTCVVVDVKHEDPEVKFNWYVDGVEVHNAKTKPREEQYNSTYRVVSVLTVLHQDWLNGKEYKCKVSNKALPAPIEKTISKAKGQPREPQVYTLPPSREEMTKNQVSLTCLVKGFYPSDIAVEWESNGQPENNYKTTPPVLDSDGSFFLYSKLTVDKSRWQQGNVFSCSVMHEALHNHYTQKSLSLSPGK

SEQ ID NO: 985 - protein, 220 aa, synthetic construct; identical to SEQ ID NO: 484
  source 1..220: note = XENP45721 Chain 2- STEAP-A[STEAP1]_L1_Light Chain

SEQ ID NO: 986 - protein, 453 aa, synthetic construct
  source 1..453: note = XENP45722 Chain 1- STEAP-A[STEAP1]_H1.129_IgG1_PVA_/S267K
QVQVQESGPGLVKPSQTLSLTCTVSGYSITSDYAWNWIRQPPGKKLEWIGYISNSGSTSYNPSLKSRVTISRDTSKNQFSLKLSSVTAADTAVYYCARERHYDYDDYYYAMDYWGQGTLVTVSSASTKGPSVFPLAPSSKSTSGGTAALGCLVKDYFPEPVTVSWNSGALTSGVHTFPAVLQSSGLYSLSSVVTVPSSSLGTQTYICNVNHKPSNTKVDKKVEPKSCDKTHTCPPCPAPPVAGPSVFLFPPKPKDTLMISRTPEVTCVVVDVKHEDPEVKFNWYVDGVEVHNAKTKPREEQYNSTYRVVSVLTVLHQDWLNGKEYKCKVSNKALPAPIEKTISKAKGQPREPQVYTLPPSREEMTKNQVSLTCLVKGFYPSDIAVEWESNGQPENNYKTTPPVLDSDGSFFLYSKLTVDKSRWQQGNVFSCSVMHEALHNHYTQKSLSLSPGK

SEQ ID NO: 987 - protein, 220 aa, synthetic construct; identical to SEQ ID NO: 484
  source 1..220: note = XENP45722 Chain 2- STEAP-A[STEAP1]_L1_Light Chain

SEQ ID NO: 988 - protein, 453 aa, synthetic construct
  source 1..453: note = XENP45723 Chain 1- STEAP-A[STEAP1]_H1.130_IgG1_PVA_/S267K
QVQVQESGPGLVKPSQTLSLTCTVSGYSITSDYAWNWIRQPPGKKLEWIGYISNSGSTSYNPSLKSRVTISRDTSKNQFSLKLSSVTAADTAVYYCARERLYDYDDYYYAMDYWGQGTLVTVSSASTKGPSVFPLAPSSKSTSGGTAALGCLVKDYFPEPVTVSWNSGALTSGVHTFPAVLQSSGLYSLSSVVTVPSSSLGTQTYICNVNHKPSNTKVDKKVEPKSCDKTHTCPPCPAPPVAGPSVFLFPPKPKDTLMISRTPEVTCVVVDVKHEDPEVKFNWYVDGVEVHNAKTKPREEQYNSTYRVVSVLTVLHQDWLNGKEYKCKVSNKALPAPIEKTISKAKGQPREPQVYTLPPSREEMTKNQVSLTCLVKGFYPSDIAVEWESNGQPENNYKTTPPVLDSDGSFFLYSKLTVDKSRWQQGNVFSCSVMHEALHNHYTQKSLSLSPGK

SEQ ID NO: 989 - protein, 220 aa, synthetic construct; identical to SEQ ID NO: 484
  source 1..220: note = XENP45723 Chain 2- STEAP-A[STEAP1]_L1_Light Chain

SEQ ID NO: 990 - protein, 453 aa, synthetic construct
  source 1..453: note = XENP45724 Chain 1- STEAP-A[STEAP1]_H1.131_IgG1_PVA_/S267K
QVQVQESGPGLVKPSQTLSLTCTVSGYSITSDYAWNWIRQPPGKKLEWIGYISNSGSTSYNPSLKSRVTISRDTSKNQFSLKLSSVTAADTAVYYCARERQYDYDDYYYAMDYWGQGTLVTVSSASTKGPSVFPLAPSSKSTSGGTAALGCLVKDYFPEPVTVSWNSGALTSGVHTFPAVLQSSGLYSLSSVVTVPSSSLGTQTYICNVNHKPSNTKVDKKVEPKSCDKTHTCPPCPAPPVAGPSVFLFPPKPKDTLMISRTPEVTCVVVDVKHEDPEVKFNWYVDGVEVHNAKTKPREEQYNSTYRVVSVLTVLHQDWLNGKEYKCKVSNKALPAPIEKTISKAKGQPREPQVYTLPPSREEMTKNQVSLTCLVKGFYPSDIAVEWESNGQPENNYKTTPPVLDSDGSFFLYSKLTVDKSRWQQGNVFSCSVMHEALHNHYTQKSLSLSPGK

SEQ ID NO: 991 - protein, 220 aa, synthetic construct; identical to SEQ ID NO: 484
  source 1..220: note = XENP45724 Chain 2- STEAP-A[STEAP1]_L1_Light Chain

SEQ ID NO: 992 - protein, 453 aa, synthetic construct
  source 1..453: note = XENP45725 Chain 1- STEAP-A[STEAP1]_H1.132_IgG1_PVA_/S267K
QVQVQESGPGLVKPSQTLSLTCTVSGYSITSDYAWNWIRQPPGKKLEWIGYISNSGSTSYNPSLKSRVTISRDTSKNQFSLKLSSVTAADTAVYYCARERRYDYDDYYYAMDYWGQGTLVTVSSASTKGPSVFPLAPSSKSTSGGTAALGCLVKDYFPEPVTVSWNSGALTSGVHTFPAVLQSSGLYSLSSVVTVPSSSLGTQTYICNVNHKPSNTKVDKKVEPKSCDKTHTCPPCPAPPVAGPSVFLFPPKPKDTLMISRTPEVTCVVVDVKHEDPEVKFNWYVDGVEVHNAKTKPREEQYNSTYRVVSVLTVLHQDWLNGKEYKCKVSNKALPAPIEKTISKAKGQPREPQVYTLPPSREEMTKNQVSLTCLVKGFYPSDIAVEWESNGQPENNYKTTPPVLDSDGSFFLYSKLTVDKSRWQQGNVFSCSVMHEALHNHYTQKSLSLSPGK

SEQ ID NO: 993 - protein, 220 aa, synthetic construct; identical to SEQ ID NO: 484
  source 1..220: note = XENP45725 Chain 2- STEAP-A[STEAP1]_L1_Light Chain

SEQ ID NO: 994 - protein, 453 aa, synthetic construct
  source 1..453: note = XENP45726 Chain 1- STEAP-A[STEAP1]_H1.133_IgG1_PVA_/S267K
QVQVQESGPGLVKPSQTLSLTCTVSGYSITSDYAWNWIRQPPGKKLEWIGYISNSGSTSYNPSLKSRVTISRDTSKNQFSLKLSSVTAADTAVYYCARERSYDYDDYYYAMDYWGQGTLVTVSSASTKGPSVFPLAPSSKSTSGGTAALGCLVKDYFPEPVTVSWNSGALTSGVHTFPAVLQSSGLYSLSSVVTVPSSSLGTQTYICNVNHKPSNTKVDKKVEPKSCDKTHTCPPCPAPPVAGPSVFLFPPKPKDTLMISRTPEVTCVVVDVKHEDPEVKFNWYVDGVEVHNAKTKPREEQYNSTYRVVSVLTVLHQDWLNGKEYKCKVSNKALPAPIEKTISKAKGQPREPQVYTLPPSREEMTKNQVSLTCLVKGFYPSDIAVEWESNGQPENNYKTTPPVLDSDGSFFLYSKLTVDKSRWQQGNVFSCSVMHEALHNHYTQKSLSLSPGK

SEQ ID NO: 995 - protein, 220 aa, synthetic construct; identical to SEQ ID NO: 484
  source 1..220: note = XENP45726 Chain 2- STEAP-A[STEAP1]_L1_Light Chain

SEQ ID NO: 996 - protein, 453 aa, synthetic construct
  source 1..453: note = XENP45727 Chain 1- STEAP-A[STEAP1]_H1.134_IgG1_PVA_/S267K
QVQVQESGPGLVKPSQTLSLTCTVSGYSITSDYAWNWIRQPPGKKLEWIGYISNSGSTSYNPSLKSRVTISRDTSKNQFSLKLSSVTAADTAVYYCARERTYDYDDYYYAMDYWGQGTLVTVSSASTKGPSVFPLAPSSKSTSGGTAALGCLVKDYFPEPVTVSWNSGALTSGVHTFPAVLQSSGLYSLSSVVTVPSSSLGTQTYICNVNHKPSNTKVDKKVEPKSCDKTHTCPPCPAPPVAGPSVFLFPPKPKDTLMISRTPEVTCVVVDVKHEDPEVKFNWYVDGVEVHNAKTKPREEQYNSTYRVVSVLTVLHQDWLNGKEYKCKVSNKALPAPIEKTISKAKGQPREPQVYTLPPSREEMTKNQVSLTCLVKGFYPSDIAVEWESNGQPENNYKTTPPVLDSDGSFFLYSKLTVDKSRWQQGNVFSCSVMHEALHNHYTQKSLSLSPGK

SEQ ID NO: 997 - protein, 220 aa, synthetic construct; identical to SEQ ID NO: 484
  source 1..220: note = XENP45727 Chain 2- STEAP-A[STEAP1]_L1_Light Chain

SEQ ID NO: 998 - protein, 453 aa, synthetic construct
  source 1..453: note = XENP45728 Chain 1- STEAP-A[STEAP1]_H1.135_IgG1_PVA_/S267K
QVQVQESGPGLVKPSQTLSLTCTVSGYSITSDYAWNWIRQPPGKKLEWIGYISNSGSTSYNPSLKSRVTISRDTSKNQFSLKLSSVTAADTAVYYCARERNADYDDYYYAMDYWGQGTLVTVSSASTKGPSVFPLAPSSKSTSGGTAALGCLVKDYFPEPVTVSWNSGALTSGVHTFPAVLQSSGLYSLSSVVTVPSSSLGTQTYICNVNHKPSNTKVDKKVEPKSCDKTHTCPPCPAPPVAGPSVFLFPPKPKDTLMISRTPEVTCVVVDVKHEDPEVKFNWYVDGVEVHNAKTKPREEQYNSTYRVVSVLTVLHQDWLNGKEYKCKVSNKALPAPIEKTISKAKGQPREPQVYTLPPSREEMTKNQVSLTCLVKGFYPSDIAVEWESNGQPENNYKTTPPVLDSDGSFFLYSKLTVDKSRWQQGNVFSCSVMHEALHNHYTQKSLSLSPGK

SEQ ID NO: 999 - protein, 220 aa, synthetic construct; identical to SEQ ID NO: 484
  source 1..220: note = XENP45728 Chain 2- STEAP-A[STEAP1]_L1_Light Chain

SEQ ID NO: 1000 - protein, 453 aa, synthetic construct
  source 1..453: note = XENP45729 Chain 1- STEAP-A[STEAP1]_H1.136_IgG1_PVA_/S267K
QVQVQESGPGLVKPSQTLSLTCTVSGYSITSDYAWNWIRQPPGKKLEWIGYISNSGSTSYNPSLKSRVTISRDTSKNQFSLKLSSVTAADTAVYYCARERNFDYDDYYYAMDYWGQGTLVTVSSASTKGPSVFPLAPSSKSTSGGTAALGCLVKDYFPEPVTVSWNSGALTSGVHTFPAVLQSSGLYSLSSVVTVPSSSLGTQTYICNVNHKPSNTKVDKKVEPKSCDKTHTCPPCPAPPVAGPSVFLFPPKPKDTLMISRTPEVTCVVVDVKHEDPEVKFNWYVDGVEVHNAKTKPREEQYNSTYRVVSVLTVLHQDWLNGKEYKCKVSNKALPAPIEKTISKAKGQPREPQVYTLPPSREEMTKNQVSLTCLVKGFYPSDIAVEWESNGQPENNYKTTPPVLDSDGSFFLYSKLTVDKSRWQQGNVFSCSVMHEALHNHYTQKSLSLSPGK

SEQ ID NO: 1001 - protein, 220 aa, synthetic construct; identical to SEQ ID NO: 484
  source 1..220: note = XENP45729 Chain 2- STEAP-A[STEAP1]_L1_Light Chain

SEQ ID NO: 1002 - protein, 453 aa, synthetic construct
  source 1..453: note = XENP45730 Chain 1- STEAP-A[STEAP1]_H1.137_IgG1_PVA_/S267K
QVQVQESGPGLVKPSQTLSLTCTVSGYSITSDYAWNWIRQPPGKKLEWIGYISNSGSTSYNPSLKSRVTISRDTSKNQFSLKLSSVTAADTAVYYCARERNHDYDDYYYAMDYWGQGTLVTVSSASTKGPSVFPLAPSSKSTSGGTAALGCLVKDYFPEPVTVSWNSGALTSGVHTFPAVLQSSGLYSLSSVVTVPSSSLGTQTYICNVNHKPSNTKVDKKVEPKSCDKTHTCPPCPAPPVAGPSVFLFPPKPKDTLMISRTPEVTCVVVDVKHEDPEVKFNWYVDGVEVHNAKTKPREEQYNSTYRVVSVLTVLHQDWLNGKEYKCKVSNKALPAPIEKTISKAKGQPREPQVYTLPPSREEMTKNQVSLTCLVKGFYPSDIAVEWESNGQPENNYKTTPPVLDSDGSFFLYSKLTVDKSRWQQGNVFSCSVMHEALHNHYTQKSLSLSPGK

SEQ ID NO: 1003 - protein, 220 aa, synthetic construct; identical to SEQ ID NO: 484
  source 1..220: note = XENP45730 Chain 2- STEAP-A[STEAP1]_L1_Light Chain

SEQ ID NO: 1004 - protein, 453 aa, synthetic construct
  source 1..453: note = XENP45731 Chain 1- STEAP-A[STEAP1]_H1.138_IgG1_PVA_/S267K
QVQVQESGPGLVKPSQTLSLTCTVSGYSITSDYAWNWIRQPPGKKLEWIGYISNSGSTSYNPSLKSRVTISRDTSKNQFSLKLSSVTAADTAVYYCARERNKDYDDYYYAMDYWGQGTLVTVSSASTKGPSVFPLAPSSKSTSGGTAALGCLVKDYFPEPVTVSWNSGALTSGVHTFPAVLQSSGLYSLSSVVTVPSSSLGTQTYICNVNHKPSNTKVDKKVEPKSCDKTHTCPPCPAPPVAGPSVFLFPPKPKDTLMISRTPEVTCVVVDVKHEDPEVKFNWYVDGVEVHNAKTKPREEQYNSTYRVVSVLTVLHQDWLNGKEYKCKVSNKALPAPIEKTISKAKGQPREPQVYTLPPSREEMTKNQVSLTCLVKGFYPSDIAVEWESNGQPENNYKTTPPVLDSDGSFFLYSKLTVDKSRWQQGNVFSCSVMHEALHNHYTQKSLSLSPGK

SEQ ID NO: 1005 - protein, 220 aa, synthetic construct; identical to SEQ ID NO: 484
  source 1..220: note = XENP45731 Chain 2- STEAP-A[STEAP1]_L1_Light Chain

SEQ ID NO: 1006 - protein, 453 aa, synthetic construct
  source 1..453: note = XENP45732 Chain 1- STEAP-A[STEAP1]_H1.139_IgG1_PVA_/S267K
QVQVQESGPGLVKPSQTLSLTCTVSGYSITSDYAWNWIRQPPGKKLEWIGYISNSGSTSYNPSLKSRVTISRDTSKNQFSLKLSSVTAADTAVYYCARERNLDYDDYYYAMDYWGQGTLVTVSSASTKGPSVFPLAPSSKSTSGGTAALGCLVKDYFPEPVTVSWNSGALTSGVHTFPAVLQSSGLYSLSSVVTVPSSSLGTQTYICNVNHKPSNTKVDKKVEPKSCDKTHTCPPCPAPPVAGPSVFLFPPKPKDTLMISRTPEVTCVVVDVKHEDPEVKFNWYVDGVEVHNAKTKPREEQYNSTYRVVSVLTVLHQDWLNGKEYKCKVSNKALPAPIEKTISKAKGQPREPQVYTLPPSREEMTKNQVSLTCLVKGFYPSDIAVEWESNGQPENNYKTTPPVLDSDGSFFLYSKLTVDKSRWQQGNVFSCSVMHEALHNHYTQKSLSLSPGK

SEQ ID NO: 1007 - protein, 220 aa, synthetic construct; identical to SEQ ID NO: 484
  source 1..220: note = XENP45732 Chain 2- STEAP-A[STEAP1]_L1_Light Chain

SEQ ID NO: 1008 - protein, 453 aa, synthetic construct
  source 1..453: note = XENP45733 Chain 1- STEAP-A[STEAP1]_H1.140_IgG1_PVA_/S267K
QVQVQESGPGLVKPSQTLSLTCTVSGYSITSDYAWNWIRQPPGKKLEWIGYISNSGSTSYNPSLKSRVTISRDTSKNQFSLKLSSVTAADTAVYYCARERNQDYDDYYYAMDYWGQGTLVTVSSASTKGPSVFPLAPSSKSTSGGTAALGCLVKDYFPEPVTVSWNSGALTSGVHTFPAVLQSSGLYSLSSVVTVPSSSLGTQTYICNVNHKPSNTKVDKKVEPKSCDKTHTCPPCPAPPVAGPSVFLFPPKPKDTLMISRTPEVTCVVVDVKHEDPEVKFNWYVDGVEVHNAKTKPREEQYNSTYRVVSVLTVLHQDWLNGKEYKCKVSNKALPAPIEKTISKAKGQPREPQVYTLPPSREEMTKNQVSLTCLVKGFYPSDIAVEWESNGQPENNYKTTPPVLDSDGSFFLYSKLTVDKSRWQQGNVFSCSVMHEALHNHYTQKSLSLSPGK

SEQ ID NO: 1009 - protein, 220 aa, synthetic construct; identical to SEQ ID NO: 484
  source 1..220: note = XENP45733 Chain 2- STEAP-A[STEAP1]_L1_Light Chain

SEQ ID NO: 1010 - protein, 453 aa, synthetic construct
  source 1..453: note = XENP45734 Chain 1- STEAP-A[STEAP1]_H1.141_IgG1_PVA_/S267K
QVQVQESGPGLVKPSQTLSLTCTVSGYSITSDYAWNWIRQPPGKKLEWIGYISNSGSTSYNPSLKSRVTISRDTSKNQFSLKLSSVTAADTAVYYCARERNVDYDDYYYAMDYWGQGTLVTVSSASTKGPSVFPLAPSSKSTSGGTAALGCLVKDYFPEPVTVSWNSGALTSGVHTFPAVLQSSGLYSLSSVVTVPSSSLGTQTYICNVNHKPSNTKVDKKVEPKSCDKTHTCPPCPAPPVAGPSVFLFPPKPKDTLMISRTPEVTCVVVDVKHEDPEVKFNWYVDGVEVHNAKTKPREEQYNSTYRVVSVLTVLHQDWLNGKEYKCKVSNKALPAPIEKTISKAKGQPREPQVYTLPPSREEMTKNQVSLTCLVKGFYPSDIAVEWESNGQPENNYKTTPPVLDSDGSFFLYSKLTVDKSRWQQGNVFSCSVMHEALHNHYTQKSLSLSPGK

SEQ ID NO: 1011 - protein, 220 aa, synthetic construct; identical to SEQ ID NO: 484
  source 1..220: note = XENP45734 Chain 2- STEAP-A[STEAP1]_L1_Light Chain

SEQ ID NO: 1012 - protein, 453 aa, synthetic construct
  source 1..453: note = XENP45735 Chain 1- STEAP-A[STEAP1]_H1.142_IgG1_PVA_/S267K
QVQVQESGPGLVKPSQTLSLTCTVSGYSITSDYAWNWIRQPPGKKLEWIGYISNSGSTSYNPSLKSRVTISRDTSKNQFSLKLSSVTAADTAVYYCARERNYEYDDYYYAMDYWGQGTLVTVSSASTKGPSVFPLAPSSKSTSGGTAALGCLVKDYFPEPVTVSWNSGALTSGVHTFPAVLQSSGLYSLSSVVTVPSSSLGTQTYICNVNHKPSNTKVDKKVEPKSCDKTHTCPPCPAPPVAGPSVFLFPPKPKDTLMISRTPEVTCVVVDVKHEDPEVKFNWYVDGVEVHNAKTKPREEQYNSTYRVVSVLTVLHQDWLNGKEYKCKVSNKALPAPIEKTISKAKGQPREPQVYTLPPSREEMTKNQVSLTCLVKGFYPSDIAVEWESNGQPENNYKTTPPVLDSDGSFFLYSKLTVDKSRWQQGNVFSCSVMHEALHNHYTQKSLSLSPGK

SEQ ID NO: 1013 - protein, 220 aa, synthetic construct; identical to SEQ ID NO: 484
  source 1..220: note = XENP45735 Chain 2- STEAP-A[STEAP1]_L1_Light Chain

SEQ ID NO: 1014 - protein, 453 aa, synthetic construct
  source 1..453: note = XENP45736 Chain 1- STEAP-A[STEAP1]_H1.143_IgG1_PVA_/S267K
QVQVQESGPGLVKPSQTLSLTCTVSGYSITSDYAWNWIRQPPGKKLEWIGYISNSGSTSYNPSLKSRVTISRDTSKNQFSLKLSSVTAADTAVYYCARERNYGYDDYYYAMDYWGQGTLVTVSSASTKGPSVFPLAPSSKSTSGGTAALGCLVKDYFPEPVTVSWNSGALTSGVHTFPAVLQSSGLYSLSSVVTVPSSSLGTQTYICNVNHKPSNTKVDKKVEPKSCDKTHTCPPCPAPPVAGPSVFLFPPKPKDTLMISRTPEVTCVVVDVKHEDPEVKFNWYVDGVEVHNAKTKPREEQYNSTYRVVSVLTVLHQDWLNGKEYKCKVSNKALPAPIEKTISKAKGQPREPQVYTLPPSREEMTKNQVSLTCLVKGFYPSDIAVEWESNGQPENNYKTTPPVLDSDGSFFLYSKLTVDKSRWQQGNVFSCSVMHEALHNHYTQKSLSLSPGK

SEQ ID NO: 1015 - protein, 220 aa, synthetic construct; identical to SEQ ID NO: 484
  source 1..220: note = XENP45736 Chain 2- STEAP-A[STEAP1]_L1_Light Chain

SEQ ID NO: 1016 - protein, 453 aa, synthetic construct
  source 1..453: note = XENP45737 Chain 1- STEAP-A[STEAP1]_H1.144_IgG1_PVA_/S267K
QVQVQESGPGLVKPSQTLSLTCTVSGYSITSDYAWNWIRQPPGKKLEWIGYISNSGSTSYNPSLKSRVTISRDTSKNQFSLKLSSVTAADTAVYYCARERNYHYDDYYYAMDYWGQGTLVTVSSASTKGPSVFPLAPSSKSTSGGTAALGCLVKDYFPEPVTVSWNSGALTSGVHTFPAVLQSSGLYSLSSVVTVPSSSLGTQTYICNVNHKPSNTKVDKKVEPKSCDKTHTCPPCPAPPVAGPSVFLFPPKPKDTLMISRTPEVTCVVVDVKHEDPEVKFNWYVDGVEVHNAKTKPREEQYNSTYRVVSVLTVLHQDWLNGKEYKCKVSNKALPAPIEKTISKAKGQPREPQVYTLPPSREEMTKNQVSLTCLVKGFYPSDIAVEWESNGQPENNYKTTPPVLDSDGSFFLYSKLTVDKSRWQQGNVFSCSVMHEALHNHYTQKSLSLSPGK

SEQ ID NO: 1017 - protein, 220 aa, synthetic construct; identical to SEQ ID NO: 484
  source 1..220: note = XENP45737 Chain 2- STEAP-A[STEAP1]_L1_Light Chain

SEQ ID NO: 1018 - protein, 453 aa, synthetic construct
  source 1..453: note = XENP45738 Chain 1- STEAP-A[STEAP1]_H1.145_IgG1_PVA_/S267K
QVQVQESGPGLVKPSQTLSLTCTVSGYSITSDYAWNWIRQPPGKKLEWIGYISNSGSTSYNPSLKSRVTISRDTSKNQFSLKLSSVTAADTAVYYCARERNYLYDDYYYAMDYWGQGTLVTVSSASTKGPSVFPLAPSSKSTSGGTAALGCLVKDYFPEPVTVSWNSGALTSGVHTFPAVLQSSGLYSLSSVVTVPSSSLGTQTYICNVNHKPSNTKVDKKVEPKSCDKTHTCPPCPAPPVAGPSVFLFPPKPKDTLMISRTPEVTCVVVDVKHEDPEVKFNWYVDGVEVHNAKTKPREEQYNSTYRVVSVLTVLHQDWLNGKEYKCKVSNKALPAPIEKTISKAKGQPREPQVYTLPPSREEMTKNQVSLTCLVKGFYPSDIAVEWESNGQPENNYKTTPPVLDSDGSFFLYSKLTVDKSRWQQGNVFSCSVMHEALHNHYTQKSLSLSPGK

SEQ ID NO: 1019 - protein, 220 aa, synthetic construct; identical to SEQ ID NO: 484
  source 1..220: note = XENP45738 Chain 2- STEAP-A[STEAP1]_L1_Light Chain

SEQ ID NO: 1020 - protein, 453 aa, synthetic construct
  source 1..453: note = XENP45739 Chain 1- STEAP-A[STEAP1]_H1.146_IgG1_PVA_/S267K
QVQVQESGPGLVKPSQTLSLTCTVSGYSITSDYAWNWIRQPPGKKLEWIGYISNSGSTSYNPSLKSRVTISRDTSKNQFSLKLSSVTAADTAVYYCARERNYNYDDYYYAMDYWGQGTLVTVSSASTKGPSVFPLAPSSKSTSGGTAALGCLVKDYFPEPVTVSWNSGALTSGVHTFPAVLQSSGLYSLSSVVTVPSSSLGTQTYICNVNHKPSNTKVDKKVEPKSCDKTHTCPPCPAPPVAGPSVFLFPPKPKDTLMISRTPEVTCVVVDVKHEDPEVKFNWYVDGVEVHNAKTKPREEQYNSTYRVVSVLTVLHQDWLNGKEYKCKVSNKALPAPIEKTISKAKGQPREPQVYTLPPSREEMTKNQVSLTCLVKGFYPSDIAVEWESNGQPENNYKTTPPVLDSDGSFFLYSKLTVDKSRWQQGNVFSCSVMHEALHNHYTQKSLSLSPGK

SEQ ID NO: 1021 - protein, 220 aa, synthetic construct; identical to SEQ ID NO: 484
  source 1..220: note = XENP45739 Chain 2- STEAP-A[STEAP1]_L1_Light Chain

SEQ ID NO: 1022 - protein, 453 aa, synthetic construct
  source 1..453: note = XENP45740 Chain 1- STEAP-A[STEAP1]_H1.147_IgG1_PVA_/S267K
QVQVQESGPGLVKPSQTLSLTCTVSGYSITSDYAWNWIRQPPGKKLEWIGYISNSGSTSYNPSLKSRVTISRDTSKNQFSLKLSSVTAADTAVYYCARERNYRYDDYYYAMDYWGQGTLVTVSSASTKGPSVFPLAPSSKSTSGGTAALGCLVKDYFPEPVTVSWNSGALTSGVHTFPAVLQSSGLYSLSSVVTVPSSSLGTQTYICNVNHKPSNTKVDKKVEPKSCDKTHTCPPCPAPPVAGPSVFLFPPKPKDTLMISRTPEVTCVVVDVKHEDPEVKFNWYVDGVEVHNAKTKPREEQYNSTYRVVSVLTVLHQDWLNGKEYKCKVSNKALPAPIEKTISKAKGQPREPQVYTLPPSREEMTKNQVSLTCLVKGFYPSDIAVEWESNGQPENNYKTTPPVLDSDGSFFLYSKLTVDKSRWQQGNVFSCSVMHEALHNHYTQKSLSLSPGK

SEQ ID NO: 1023 - protein, 220 aa, synthetic construct; identical to SEQ ID NO: 484
  source 1..220: note = XENP45740 Chain 2- STEAP-A[STEAP1]_L1_Light Chain

SEQ ID NO: 1024 - protein, 453 aa, synthetic construct
  source 1..453: note = XENP45741 Chain 1- STEAP-A[STEAP1]_H1.148_IgG1_PVA_/S267K
QVQVQESGPGLVKPSQTLSLTCTVSGYSITSDYAWNWIRQPPGKKLEWIGYISNSGSTSYNPSLKSRVTISRDTSKNQFSLKLSSVTAADTAVYYCARERNYSYDDYYYAMDYWGQGTLVTVSSASTKGPSVFPLAPSSKSTSGGTAALGCLVKDYFPEPVTVSWNSGALTSGVHTFPAVLQSSGLYSLSSVVTVPSSSLGTQTYICNVNHKPSNTKVDKKVEPKSCDKTHTCPPCPAPPVAGPSVFLFPPKPKDTLMISRTPEVTCVVVDVKHEDPEVKFNWYVDGVEVHNAKTKPREEQYNSTYRVVSVLTVLHQDWLNGKEYKCKVSNKALPAPIEKTISKAKGQPREPQVYTLPPSREEMTKNQVSLTCLVKGFYPSDIAVEWESNGQPENNYKTTPPVLDSDGSFFLYSKLTVDKSRWQQGNVFSCSVMHEALHNHYTQKSLSLSPGK

SEQ ID NO: 1025 - protein, 220 aa, synthetic construct; identical to SEQ ID NO: 484
  source 1..220: note = XENP45741 Chain 2- STEAP-A[STEAP1]_L1_Light Chain

SEQ ID NO: 1026 - protein, 453 aa, synthetic construct
  source 1..453: note = XENP45742 Chain 1- STEAP-A[STEAP1]_H1.149_IgG1_PVA_/S267K
QVQVQESGPGLVKPSQTLSLTCTVSGYSITSDYAWNWIRQPPGKKLEWIGYISNSGSTSYNPSLKSRVTISRDTSKNQFSLKLSSVTAADTAVYYCARERNYTYDDYYYAMDYWGQGTLVTVSSASTKGPSVFPLAPSSKSTSGGTAALGCLVKDYFPEPVTVSWNSGALTSGVHTFPAVLQSSGLYSLSSVVTVPSSSLGTQTYICNVNHKPSNTKVDKKVEPKSCDKTHTCPPCPAPPVAGPSVFLFPPKPKDTLMISRTPEVTCVVVDVKHEDPEVKFNWYVDGVEVHNAKTKPREEQYNSTYRVVSVLTVLHQDWLNGKEYKCKVSNKALPAPIEKTISKAKGQPREPQVYTLPPSREEMTKNQVSLTCLVKGFYPSDIAVEWESNGQPENNYKTTPPVLDSDGSFFLYSKLTVDKSRWQQGNVFSCSVMHEALHNHYTQKSLSLSPGK

SEQ ID NO: 1027 - protein, 220 aa, synthetic construct; identical to SEQ ID NO: 484
  source 1..220: note = XENP45742 Chain 2- STEAP-A[STEAP1]_L1_Light Chain

SEQ ID NO: 1028 - protein, 453 aa, synthetic construct
  source 1..453: note = XENP45743 Chain 1- STEAP-A[STEAP1]_H1.150_IgG1_PVA_/S267K
QVQVQESGPGLVKPSQTLSLTCTVSGYSITSDYAWNWIRQPPGKKLEWIGYISNSGSTSYNPSLKSRVTISRDTSKNQFSLKLSSVTAADTAVYYCARERNYDADDYYYAMDYWGQGTLVTVSSASTKGPSVFPLAPSSKSTSGGTAALGCLVKDYFPEPVTVSWNSGALTSGVHTFPAVLQSSGLYSLSSVVTVPSSSLGTQTYICNVNHKPSNTKVDKKVEPKSCDKTHTCPPCPAPPVAGPSVFLFPPKPKDTLMISRTPEVTCVVVDVKHEDPEVKFNWYVDGVEVHNAKTKPREEQYNSTYRVVSVLTVLHQDWLNGKEYKCKVSNKALPAPIEKTISKAKGQPREPQVYTLPPSREEMTKNQVSLTCLVKGFYPSDIAVEWESNGQPENNYKTTPPVLDSDGSFFLYSKLTVDKSRWQQGNVFSCSVMHEALHNHYTQKSLSLSPGK

SEQ ID NO: 1029 - protein, 220 aa, synthetic construct; identical to SEQ ID NO: 484
  source 1..220: note = XENP45743 Chain 2- STEAP-A[STEAP1]_L1_Light Chain

SEQ ID NO: 1030 - protein, 453 aa, synthetic construct
  source 1..453: note = XENP45744 Chain 1- STEAP-A[STEAP1]_H1.151_IgG1_PVA_/S267K
QVQVQESGPGLVKPSQTLSLTCTVSGYSITSDYAWNWIRQPPGKKLEWIGYISNSGSTSYNPSLKSRVTISRDTSKNQFSLKLSSVTAADTAVYYCARERNYDFDDYYYAMDYWGQGTLVTVSSASTKGPSVFPLAPSSKSTSGGTAALGCLVKDYFPEPVTVSWNSGALTSGVHTFPAVLQSSGLYSLSSVVTVPSSSLGTQTYICNVNHKPSNTKVDKKVEPKSCDKTHTCPPCPAPPVAGPSVFLFPPKPKDTLMISRTPEVTCVVVDVKHEDPEVKFNWYVDGVEVHNAKTKPREEQYNSTYRVVSVLTVLHQDWLNGKEYKCKVSNKALPAPIEKTISKAKGQPREPQVYTLPPSREEMTKNQVSLTCLVKGFYPSDIAVEWESNGQPENNYKTTPPVLDSDGSFFLYSKLTVDKSRWQQGNVFSCSVMHEALHNHYTQKSLSLSPGK

SEQ ID NO: 1031 - protein, 220 aa, synthetic construct; identical to SEQ ID NO: 484
  source 1..220: note = XENP45744 Chain 2- STEAP-A[STEAP1]_L1_Light Chain

SEQ ID NO: 1032 - protein, 453 aa, synthetic construct
  source 1..453: note = XENP45745 Chain 1- STEAP-A[STEAP1]_H1.152_IgG1_PVA_/S267K
QVQVQESGPGLVKPSQTLSLTCTVSGYSITSDYAWNWIRQPPGKKLEWIGYISNSGSTSYNPSLKSRVTISRDTSKNQFSLKLSSVTAADTAVYYCARERNYDHDDYYYAMDYWGQGTLVTVSSASTKGPSVFPLAPSSKSTSGGTAALGCLVKDYFPEPVTVSWNSGALTSGVHTFPAVLQSSGLYSLSSVVTVPSSSLGTQTYICNVNHKPSNTKVDKKVEPKSCDKTHTCPPCPAPPVAGPSVFLFPPKPKDTLMISRTPEVTCVVVDVKHEDPEVKFNWYVDGVEVHNAKTKPREEQYNSTYRVVSVLTVLHQDWLNGKEYKCKVSNKALPAPIEKTISKAKGQPREPQVYTLPPSREEMTKNQVSLTCLVKGFYPSDIAVEWESNGQPENNYKTTPPVLDSDGSFFLYSKLTVDKSRWQQGNVFSCSVMHEALHNHYTQKSLSLSPGK

SEQ ID NO: 1033 - protein, 220 aa, synthetic construct; identical to SEQ ID NO: 484
  source 1..220: note = XENP45745 Chain 2- STEAP-A[STEAP1]_L1_Light Chain

SEQ ID NO: 1034 - protein, 453 aa, synthetic construct
  source 1..453: note = XENP45746 Chain 1- STEAP-A[STEAP1]_H1.153_IgG1_PVA_/S267K
QVQVQESGPGLVKPSQTLSLTCTVSGYSITSDYAWNWIRQPPGKKLEWIGYISNSGSTSYNPSLKSRVTISRDTSKNQFSLKLSSVTAADTAVYYCARERNYDKDDYYYAMDYWGQGTLVTVSSASTKGPSVFPLAPSSKSTSGGTAALGCLVKDYFPEPVTVSWNSGALTSGVHTFPAVLQSSGLYSLSSVVTVPSSSLGTQTYICNVNHKPSNTKVDKKVEPKSCDKTHTCPPCPAPPVAGPSVFLFPPKPKDTLMISRTPEVTCVVVDVKHEDPEVKFNWYVDGVEVHNAKTKPREEQYNSTYRVVSVLTVLHQDWLNGKEYKCKVSNKALPAPIEKTISKAKGQPREPQVYTLPPSREEMTKNQVSLTCLVKGFYPSDIAVEWESNGQPENNYKTTPPVLDSDGSFFLYSKLTVDKSRWQQGNVFSCSVMHEALHNHYTQKSLSLSPGK

SEQ ID NO: 1035 - protein, 220 aa, synthetic construct; identical to SEQ ID NO: 484
  source 1..220: note = XENP45746 Chain 2- STEAP-A[STEAP1]_L1_Light Chain

SEQ ID NO: 1036 - protein, 453 aa, synthetic construct
  source 1..453: note = XENP45747 Chain 1- STEAP-A[STEAP1]_H1.154_IgG1_PVA_/S267K
QVQVQESGPGLVKPSQTLSLTCTVSGYSITSDYAWNWIRQPPGKKLEWIGYISNSGSTSYNPSLKSRVTISRDTSKNQFSLKLSSVTAADTAVYYCARERNYDLDDYYYAMDYWGQGTLVTVSSASTKGPSVFPLAPSSKSTSGGTAALGCLVKDYFPEPVTVSWNSGALTSGVHTFPAVLQSSGLYSLSSVVTVPSSSLGTQTYICNVNHKPSNTKVDKKVEPKSCDKTHTCPPCPAPPVAGPSVFLFPPKPKDTLMISRTPEVTCVVVDVKHEDPEVKFNWYVDGVEVHNAKTKPREEQYNSTYRVVSVLTVLHQDWLNGKEYKCKVSNKALPAPIEKTISKAKGQPREPQVYTLPPSREEMTKNQVSLTCLVKGFYPSDIAVEWESNGQPENNYKTTPPVLDSDGSFFLYSKLTVDKSRWQQGNVFSCSVMHEALHNHYTQKSLSLSPGK

SEQ ID NO: 1037 - protein, 220 aa, synthetic construct; identical to SEQ ID NO: 484
  source 1..220: note = XENP45747 Chain 2- STEAP-A[STEAP1]_L1_Light Chain

SEQ ID NO: 1038 - protein, 453 aa, synthetic construct
  source 1..453: note = XENP45748 Chain 1- STEAP-A[STEAP1]_H1.155_IgG1_PVA_/S267K
QVQVQESGPGLVKPSQTLSLTCTVSGYSITSDYAWNWIRQPPGKKLEWIGYISNSGSTSYNPSLKSRVTISRDTSKNQFSLKLSSVTAADTAVYYCARERNYDQDDYYYAMDYWGQGTLVTVSSASTKGPSVFPLAPSSKSTSGGTAALGCLVKDYFPEPVTVSWNSGALTSGVHTFPAVLQSSGLYSLSSVVTVPSSSLGTQTYICNVNHKPSNTKVDKKVEPKSCDKTHTCPPCPAPPVAGPSVFLFPPKPKDTLMISRTPEVTCVVVDVKHEDPEVKFNWYVDGVEVHNAKTKPREEQYNSTYRVVSVLTVLHQDWLNGKEYKCKVSNKALPAPIEKTISKAKGQPREPQVYTLPPSREEMTKNQVSLTCLVKGFYPSDIAVEWESNGQPENNYKTTPPVLDSDGSFFLYSKLTVDKSRWQQGNVFSCSVMHEALHNHYTQKSLSLSPGK

SEQ ID NO: 1039 - protein, 220 aa, synthetic construct; identical to SEQ ID NO: 484
  source 1..220: note = XENP45748 Chain 2- STEAP-A[STEAP1]_L1_Light Chain

SEQ ID NO: 1040 - protein, 453 aa, synthetic construct
  source 1..453: note = XENP45749 Chain 1- STEAP-A[STEAP1]_H1.156_IgG1_PVA_/S267K
QVQVQESGPGLVKPSQTLSLTCTVSGYSITSDYAWNWIRQPPGKKLEWIGYISNSGSTSYNPSLKSRVTISRDTSKNQFSLKLSSVTAADTAVYYCARERNYDVDDYYYAMDYWGQGTLVTVSSASTKGPSVFPLAPSSKSTSGGTAALGCLVKDYFPEPVTVSWNSGALTSGVHTFPAVLQSSGLYSLSSVVTVPSSSLGTQTYICNVNHKPSNTKVDKKVEPKSCDKTHTCPPCPAPPVAGPSVFLFPPKPKDTLMISRTPEVTCVVVDVKHEDPEVKFNWYVDGVEVHNAKTKPREEQYNSTYRVVSVLTVLHQDWLNGKEYKCKVSNKALPAPIEKTISKAKGQPREPQVYTLPPSREEMTKNQVSLTCLVKGFYPSDIAVEWESNGQPENNYKTTPPVLDSDGSFFLYSKLTVDKSRWQQGNVFSCSVMHEALHNHYTQKSLSLSPGK

SEQ ID NO: 1041 - protein, 220 aa, synthetic construct; identical to SEQ ID NO: 484
  source 1..220: note = XENP45749 Chain 2- STEAP-A[STEAP1]_L1_Light Chain

SEQ ID NO: 1042 - protein, 453 aa, synthetic construct
  source 1..453: note = XENP45750 Chain 1- STEAP-A[STEAP1]_H1.157_IgG1_PVA_/S267K
QVQVQESGPGLVKPSQTLSLTCTVSGYSITSDYAWNWIRQPPGKKLEWIGYISNSGSTSYNPSLKSRVTISRDTSKNQFSLKLSSVTAADTAVYYCARERNYDYGDYYYAMDYWGQGTLVTVSSASTKGPSVFPLAPSSKSTSGGTAALGCLVKDYFPEPVTVSWNSGALTSGVHTFPAVLQSSGLYSLSSVVTVPSSSLGTQTYICNVNHKPSNTKVDKKVEPKSCDKTHTCPPCPAPPVAGPSVFLFPPKPKDTLMISRTPEVTCVVVDVKHEDPEVKFNWYVDGVEVHNAKTKPREEQYNSTYRVVSVLTVLHQDWLNGKEYKCKVSNKALPAPIEKTISKAKGQPREPQVYTLPPSREEMTKNQVSLTCLVKGFYPSDIAVEWESNGQPENNYKTTPPVLDSDGSFFLYSKLTVDKSRWQQGNVFSCSVMHEALHNHYTQKSLSLSPGK

SEQ ID NO: 1043 - protein, 220 aa, synthetic construct; identical to SEQ ID NO: 484
  source 1..220: note = XENP45750 Chain 2- STEAP-A[STEAP1]_L1_Light Chain

SEQ ID NO: 1044 - protein, 453 aa, synthetic construct
  source 1..453: note = XENP45751 Chain 1- STEAP-A[STEAP1]_H1.158_IgG1_PVA_/S267K
QVQVQESGPGLVKPSQTLSLTCTVSGYSITSDYAWNWIRQPPGKKLEWIGYISNSGSTSYNPSLKSRVTISRDTSKNQFSLKLSSVTAADTAVYYCARERNYDYHDYYYAMDYWGQGTLVTVSSASTKGPSVFPLAPSSKSTSGGTAALGCLVKDYFPEPVTVSWNSGALTSGVHTFPAVLQSSGLYSLSSVVTVPSSSLGTQTYICNVNHKPSNTKVDKKVEPKSCDKTHTCPPCPAPPVAGPSVFLFPPKPKDTLMISRTPEVTCVVVDVKHEDPEVKFNWYVDGVEVHNAKTKPREEQYNSTYRVVSVLTVLHQDWLNGKEYKCKVSNKALPAPIEKTISKAKGQPREPQVYTLPPSREEMTKNQVSLTCLVKGFYPSDIAVEWESNGQPENNYKTTPPVLDSDGSFFLYSKLTVDKSRWQQGNVFSCSVMHEALHNHYTQKSLSLSPGK

SEQ ID NO: 1045 - protein, 220 aa, synthetic construct; identical to SEQ ID NO: 484
  source 1..220: note = XENP45751 Chain 2- STEAP-A[STEAP1]_L1_Light Chain

SEQ ID NO: 1046 - protein, 453 aa, synthetic construct
  source 1..453: note = XENP45752 Chain 1- STEAP-A[STEAP1]_H1.159_IgG1_PVA_/S267K
QVQVQESGPGLVKPSQTLSLTCTVSGYSITSDYAWNWIRQPPGKKLEWIGYISNSGSTSYNPSLKSRVTISRDTSKNQFSLKLSSVTAADTAVYYCARERNYDYNDYYYAMDYWGQGTLVTVSSASTKGPSVFPLAPSSKSTSGGTAALGCLVKDYFPEPVTVSWNSGALTSGVHTFPAVLQSSGLYSLSSVVTVPSSSLGTQTYICNVNHKPSNTKVDKKVEPKSCDKTHTCPPCPAPPVAGPSVFLFPPKPKDTLMISRTPEVTCVVVDVKHEDPEVKFNWYVDGVEVHNAKTKPREEQYNSTYRVVSVLTVLHQDWLNGKEYKCKVSNKALPAPIEKTISKAKGQPREPQVYTLPPSREEMTKNQVSLTCLVKGFYPSDIAVEWESNGQPENNYKTTPPVLDSDGSFFLYSKLTVDKSRWQQGNVFSCSVMHEALHNHYTQKSLSLSPGK

SEQ ID NO: 1047 - protein, 220 aa, synthetic construct; identical to SEQ ID NO: 484
  source 1..220: note = XENP45752 Chain 2- STEAP-A[STEAP1]_L1_Light Chain

SEQ ID NO: 1048 - protein, 453 aa, synthetic construct
  source 1..453: note = XENP45753 Chain 1- STEAP-A[STEAP1]_H1.160_IgG1_PVA_/S267K
QVQVQESGPGLVKPSQTLSLTCTVSGYSITSDYAWNWIRQPPGKKLEWIGYISNSGSTSYNPSLKSRVTISRDTSKNQFSLKLSSVTAADTAVYYCARERNYDYRDYYYAMDYWGQGTLVTVSSASTKGPSVFPLAPSSKSTSGGTAALGCLVKDYFPEPVTVSWNSGALTSGVHTFPAVLQSSGLYSLSSVVTVPSSSLGTQTYICNVNHKPSNTKVDKKVEPKSCDKTHTCPPCPAPPVAGPSVFLFPPKPKDTLMISRTPEVTCVVVDVKHEDPEVKFNWYVDGVEVHNAKTKPREEQYNSTYRVVSVLTVLHQDWLNGKEYKCKVSNKALPAPIEKTISKAKGQPREPQVYTLPPSREEMTKNQVSLTCLVKGFYPSDIAVEWESNGQPENNYKTTPPVLDSDGSFFLYSKLTVDKSRWQQGNVFSCSVMHEALHNHYTQKSLSLSPGK

SEQ ID NO: 1049 - protein, 220 aa, synthetic construct; identical to SEQ ID NO: 484
  source 1..220: note = XENP45753 Chain 2- STEAP-A[STEAP1]_L1_Light Chain

SEQ ID NO: 1050 - protein, 453 aa, synthetic construct
  source 1..453: note = XENP45754 Chain 1- STEAP-A[STEAP1]_H1.161_IgG1_PVA_/S267K
QVQVQESGPGLVKPSQTLSLTCTVSGYSITSDYAWNWIRQPPGKKLEWIGYISNSGSTSYNPSLKSRVTISRDTSKNQFSLKLSSVTAADTAVYYCARERNYDYSDYYYAMDYWGQGTLVTVSSASTKGPSVFPLAPSSKSTSGGTAALGCLVKDYFPEPVTVSWNSGALTSGVHTFPAVLQSSGLYSLSSVVTVPSSSLGTQTYICNVNHKPSNTKVDKKVEPKSCDKTHTCPPCPAPPVAGPSVFLFPPKPKDTLMISRTPEVTCVVVDVKHEDPEVKFNWYVDGVEVHNAKTKPREEQYNSTYRVVSVLTVLHQDWLNGKEYKCKVSNKALPAPIEKTISKAKGQPREPQVYTLPPSREEMTKNQVSLTCLVKGFYPSDIAVEWESNGQPENNYKTTPPVLDSDGSFFLYSKLTVDKSRWQQGNVFSCSVMHEALHNHYTQKSLSLSPGK

SEQ ID NO: 1051 - protein, 220 aa, synthetic construct; identical to SEQ ID NO: 484
  source 1..220: note = XENP45754 Chain 2- STEAP-A[STEAP1]_L1_Light Chain

SEQ ID NO: 1052 - protein, 453 aa, synthetic construct
  source 1..453: note = XENP45755 Chain 1- STEAP-A[STEAP1]_H1.162_IgG1_PVA_/S267K
QVQVQESGPGLVKPSQTLSLTCTVSGYSITSDYAWNWIRQPPGKKLEWIGYISNSGSTSYNPSLKSRVTISRDTSKNQFSLKLSSVTAADTAVYYCARERNYDYDGYYYAMDYWGQGTLVTVSSASTKGPSVFPLAPSSKSTSGGTAALGCLVKDYFPEPVTVSWNSGALTSGVHTFPAVLQSSGLYSLSSVVTVPSSSLGTQTYICNVNHKPSNTKVDKKVEPKSCDKTHTCPPCPAPPVAGPSVFLFPPKPKDTLMISRTPEVTCVVVDVKHEDPEVKFNWYVDGVEVHNAKTKPREEQYNSTYRVVSVLTVLHQDWLNGKEYKCKVSNKALPAPIEKTISKAKGQPREPQVYTLPPSREEMTKNQVSLTCLVKGFYPSDIAVEWESNGQPENNYKTTPPVLDSDGSFFLYSKLTVDKSRWQQGNVFSCSVMHEALHNHYTQKSLSLSPGK

SEQ ID NO: 1053 - protein, 220 aa, synthetic construct; identical to SEQ ID NO: 484
  source 1..220: note = XENP45755 Chain 2- STEAP-A[STEAP1]_L1_Light Chain

SEQ ID NO: 1054 - protein, 453 aa, synthetic construct
  source 1..453: note = XENP45756 Chain 1- STEAP-A[STEAP1]_H1.163_IgG1_PVA_/S267K
QVQVQESGPGLVKPSQTLSLTCTVSGYSITSDYAWNWIRQPPGKKLEWIGYISNSGSTSYNPSLKSRVTISRDTSKNQFSLKLSSVTAADTAVYYCARERNYDYDHYYYAMDYWGQGTLVTVSSASTKGPSVFPLAPSSKSTSGGTAALGCLVKDYFPEPVTVSWNSGALTSGVHTFPAVLQSSGLYSLSSVVTVPSSSLGTQTYICNVNHKPSNTKVDKKVEPKSCDKTHTCPPCPAPPVAGPSVFLFPPKPKDTLMISRTPEVTCVVVDVKHEDPEVKFNWYVDGVEVHNAKTKPREEQYNSTYRVVSVLTVLHQDWLNGKEYKCKVSNKALPAPIEKTISKAKGQPREPQVYTLPPSREEMTKNQVSLTCLVKGFYPSDIAVEWESNGQPENNYKTTPPVLDSDGSFFLYSKLTVDKSRWQQGNVFSCSVMHEALHNHYTQKSLSLSPGK

SEQ ID NO: 1055 - protein, 220 aa, synthetic construct; identical to SEQ ID NO: 484
  source 1..220: note = XENP45756 Chain 2- STEAP-A[STEAP1]_L1_Light Chain

SEQ ID NO: 1056 - protein, 453 aa, synthetic construct
  source 1..453: note = XENP45757 Chain 1- STEAP-A[STEAP1]_H1.164_IgG1_PVA_/S267K
QVQVQESGPGLVKPSQTLSLTCTVSGYSITSDYAWNWIRQPPGKKLEWIGYISNSGSTSYNPSLKSRVTISRDTSKNQFSLKLSSVTAADTAVYYCARERNYDYDIYYYAMDYWGQGTLVTVSSASTKGPSVFPLAPSSKSTSGGTAALGCLVKDYFPEPVTVSWNSGALTSGVHTFPAVLQSSGLYSLSSVVTVPSSSLGTQTYICNVNHKPSNTKVDKKVEPKSCDKTHTCPPCPAPPVAGPSVFLFPPKPKDTLMISRTPEVTCVVVDVKHEDPEVKFNWYVDGVEVHNAKTKPREEQYNSTYRVVSVLTVLHQDWLNGKEYKCKVSNKALPAPIEKTISKAKGQPREPQVYTLPPSREEMTKNQVSLTCLVKGFYPSDIAVEWESNGQPENNYKTTPPVLDSDGSFFLYSKLTVDKSRWQQGNVFSCSVMHEALHNHYTQKSLSLSPGK

SEQ ID NO: 1057 - protein, 220 aa, synthetic construct; identical to SEQ ID NO: 484
  source 1..220: note = XENP45757 Chain 2- STEAP-A[STEAP1]_L1_Light Chain

SEQ ID NO: 1058 - protein, 453 aa, synthetic construct
  source 1..453: note = XENP45758 Chain 1- STEAP-A[STEAP1]_H1.165_IgG1_PVA_/S267K
QVQVQESGPGLVKPSQTLSLTCTVSGYSITSDYAWNWIRQPPGKKLEWIGYISNSGSTSYNPSLKSRVTISRDTSKNQFSLKLSSVTAADTAVYYCARERNYDYDNYYYAMDYWGQGTLVTVSSASTKGPSVFPLAPSSKSTSGGTAALGCLVKDYFPEPVTVSWNSGALTSGVHTFPAVLQSSGLYSLSSVVTVPSSSLGTQTYICNVNHKPSNTKVDKKVEPKSCDKTHTCPPCPAPPVAGPSVFLFPPKPKDTLMISRTPEVTCVVVDVKHEDPEVKFNWYVDGVEVHNAKTKPREEQYNSTYRVVSVLTVLHQDWLNGKEYKCKVSNKALPAPIEKTISKAKGQPREPQVYTLPPSREEMTKNQVSLTCLVKGFYPSDIAVEWESNGQPENNYKTTPPVLDSDGSFFLYSKLTVDKSRWQQGNVFSCSVMHEALHNHYTQKSLSLSPGK

SEQ ID NO: 1059 - protein, 220 aa, synthetic construct; identical to SEQ ID NO: 484
  source 1..220: note = XENP45758 Chain 2- STEAP-A[STEAP1]_L1_Light Chain

SEQ ID NO: 1060 - protein, 453 aa, synthetic construct
  source 1..453: note = XENP45759 Chain 1- STEAP-A[STEAP1]_H1.166_IgG1_PVA_/S267K
QVQVQESGPGLVKPSQTLSLTCTVSGYSITSDYAWNWIRQPPGKKLEWIGYISNSGSTSYNPSLKSRVTISRDTSKNQFSLKLSSVTAADTAVYYCARERNYDYDRYYYAMDYWGQGTLVTVSSASTKGPSVFPLAPSSKSTSGGTAALGCLVKDYFPEPVTVSWNSGALTSGVHTFPAVLQSSGLYSLSSVVTVPSSSLGTQTYICNVNHKPSNTKVDKKVEPKSCDKTHTCPPCPAPPVAGPSVFLFPPKPKDTLMISRTPEVTCVVVDVKHEDPEVKFNWYVDGVEVHNAKTKPREEQYNSTYRVVSVLTVLHQDWLNGKEYKCKVSNKALPAPIEKTISKAKGQPREPQVYTLPPSREEMTKNQVSLTCLVKGFYPSDIAVEWESNGQPENNYKTTPPVLDSDGSFFLYSKLTVDKSRWQQGNVFSCSVMHEALHNHYTQKSLSLSPGK

SEQ ID NO: 1061 - protein, 220 aa, synthetic construct; identical to SEQ ID NO: 484
  source 1..220: note = XENP45759 Chain 2- STEAP-A[STEAP1]_L1_Light Chain

SEQ ID NO: 1062 - protein, 453 aa, synthetic construct
  source 1..453: note = XENP45760 Chain 1- STEAP-A[STEAP1]_H1.167_IgG1_PVA_/S267K
QVQVQESGPGLVKPSQTLSLTCTVSGYSITSDYAWNWIRQPPGKKLEWIGYISNSGSTSYNPSLKSRVTISRDTSKNQFSLKLSSVTAADTAVYYCARERNYDYDSYYYAMDYWGQGTLVTVSSASTKGPSVFPLAPSSKSTSGGTAALGCLVKDYFPEPVTVSWNSGALTSGVHTFPAVLQSSGLYSLSSVVTVPSSSLGTQTYICNVNHKPSNTKVDKKVEPKSCDKTHTCPPCPAPPVAGPSVFLFPPKPKDTLMISRTPEVTCVVVDVKHEDPEVKFNWYVDGVEVHNAKTKPREEQYNSTYRVVSVLTVLHQDWLNGKEYKCKVSNKALPAPIEKTISKAKGQPREPQVYTLPPSREEMTKNQVSLTCLVKGFYPSDIAVEWESNGQPENNYKTTPPVLDSDGSFFLYSKLTVDKSRWQQGNVFSCSVMHEALHNHYTQKSLSLSPGK

SEQ ID NO: 1063 - protein, 220 aa, synthetic construct; identical to SEQ ID NO: 484
  source 1..220: note = XENP45760 Chain 2- STEAP-A[STEAP1]_L1_Light Chain

SEQ ID NO: 1064 - protein, 453 aa, synthetic construct
  source 1..453: note = XENP45761 Chain 1- STEAP-A[STEAP1]_H1.168_IgG1_PVA_/S267K
QVQVQESGPGLVKPSQTLSLTCTVSGYSITSDYAWNWIRQPPGKKLEWIGYISNSGSTSYNPSLKSRVTISRDTSKNQFSLKLSSVTAADTAVYYCARERNYDYDVYYYAMDYWGQGTLVTVSSASTKGPSVFPLAPSSKSTSGGTAALGCLVKDYFPEPVTVSWNSGALTSGVHTFPAVLQSSGLYSLSSVVTVPSSSLGTQTYICNVNHKPSNTKVDKKVEPKSCDKTHTCPPCPAPPVAGPSVFLFPPKPKDTLMISRTPEVTCVVVDVKHEDPEVKFNWYVDGVEVHNAKTKPREEQYNSTYRVVSVLTVLHQDWLNGKEYKCKVSNKALPAPIEKTISKAKGQPREPQVYTLPPSREEMTKNQVSLTCLVKGFYPSDIAVEWESNGQPENNYKTTPPVLDSDGSFFLYSKLTVDKSRWQQGNVFSCSVMHEALHNHYTQKSLSLSPGK

SEQ ID NO: 1065 - protein, 220 aa, synthetic construct; identical to SEQ ID NO: 484
  source 1..220: note = XENP45761 Chain 2- STEAP-A[STEAP1]_L1_Light Chain

SEQ ID NO: 1066 - protein, 453 aa, synthetic construct
  source 1..453: note = XENP45762 Chain 1- STEAP-A[STEAP1]_H1.169_IgG1_PVA_/S267K
QVQVQESGPGLVKPSQTLSLTCTVSGYSITSDYAWNWIRQPPGKKLEWIGYISNSGSTSYNPSLKSRVTISRDTSKNQFSLKLSSVTAADTAVYYCARERNYDYEGYYYAMDYWGQGTLVTVSSASTKGPSVFPLAPSSKSTSGGTAALGCLVKDYFPEPVTVSWNSGALTSGVHTFPAVLQSSGLYSLSSVVTVPSSSLGTQTYICNVNHKPSNTKVDKKVEPKSCDKTHTCPPCPAPPVAGPSVFLFPPKPKDTLMISRTPEVTCVVVDVKHEDPEVKFNWYVDGVEVHNAKTKPREEQYNSTYRVVSVLTVLHQDWLNGKEYKCKVSNKALPAPIEKTISKAKGQPREPQVYTLPPSREEMTKNQVSLTCLVKGFYPSDIAVEWESNGQPENNYKTTPPVLDSDGSFFLYSKLTVDKSRWQQGNVFSCSVMHEALHNHYTQKSLSLSPGK

SEQ ID NO: 1067 - protein, 220 aa, synthetic construct; identical to SEQ ID NO: 484
  source 1..220: note = XENP45762 Chain 2- STEAP-A[STEAP1]_L1_Light Chain

SEQ ID NO: 1068 - protein, 453 aa, synthetic construct
  source 1..453: note = XENP45763 Chain 1- STEAP-A[STEAP1]_H1.170_IgG1_PVA_/S267K
QVQVQESGPGLVKPSQTLSLTCTVSGYSITSDYAWNWIRQPPGKKLEWIGYISNSGSTSYNPSLKSRVTISRDTSKNQFSLKLSSVTAADTAVYYCARERNYDYEHYYYAMDYWGQGTLVTVSSASTKGPSVFPLAPSSKSTSGGTAALGCLVKDYFPEPVTVSWNSGALTSGVHTFPAVLQSSGLYSLSSVVTVPSSSLGTQTYICNVNHKPSNTKVDKKVEPKSCDKTHTCPPCPAPPVAGPSVFLFPPKPKDTLMISRTPEVTCVVVDVKHEDPEVKFNWYVDGVEVHNAKTKPREEQYNSTYRVVSVLTVLHQDWLNGKEYKCKVSNKALPAPIEKTISKAKGQPREPQVYTLPPSREEMTKNQVSLTCLVKGFYPSDIAVEWESNGQPENNYKTTPPVLDSDGSFFLYSKLTVDKSRWQQGNVFSCSVMHEALHNHYTQKSLSLSPGK

SEQ ID NO: 1069 - protein, 220 aa, synthetic construct; identical to SEQ ID NO: 484
  source 1..220: note = XENP45763 Chain 2- STEAP-A[STEAP1]_L1_Light Chain

SEQ ID NO: 1070 - protein, 453 aa, synthetic construct
  source 1..453: note = XENP45764 Chain 1- STEAP-A[STEAP1]_H1.171_IgG1_PVA_/S267K
QVQVQESGPGLVKPSQTLSLTCTVSGYSITSDYAWNWIRQPPGKKLEWIGYISNSGSTSYNPSLKSRVTISRDTSKNQFSLKLSSVTAADTAVYYCARERNYDYEIYYYAMDYWGQGTLVTVSSASTKGPSVFPLAPSSKSTSGGTAALGCLVKDYFPEPVTVSWNSGALTSGVHTFPAVLQSSGLYSLSSVVTVPSSSLGTQTYICNVNHKPSNTKVDKKVEPKSCDKTHTCPPCPAPPVAGPSVFLFPPKPKDTLMISRTPEVTCVVVDVKHEDPEVKFNWYVDGVEVHNAKTKPREEQYNSTYRVVSVLTVLHQDWLNGKEYKCKVSNKALPAPIEKTISKAKGQPREPQVYTLPPSREEMTKNQVSLTCLVKGFYPSDIAVEWESNGQPENNYKTTPPVLDSDGSFFLYSKLTVDKSRWQQGNVFSCSVMHEALHNHYTQKSLSLSPGK

SEQ ID NO: 1071 - protein, 220 aa, synthetic construct; identical to SEQ ID NO: 484
  source 1..220: note = XENP45764 Chain 2- STEAP-A[STEAP1]_L1_Light Chain

SEQ ID NO: 1072 - protein, 453 aa, synthetic construct
  source 1..453: note = XENP45765 Chain 1- STEAP-A[STEAP1]_H1.172_IgG1_PVA_/S267K
QVQVQESGPGLVKPSQTLSLTCTVSGYSITSDYAWNWIRQPPGKKLEWIGYISNSGSTSYNPSLKSRVTISRDTSKNQFSLKLSSVTAADTAVYYCARERNYDYENYYYAMDYWGQGTLVTVSSASTKGPSVFPLAPSSKSTSGGTAALGCLVKDYFPEPVTVSWNSGALTSGVHTFPAVLQSSGLYSLSSVVTVPSSSLGTQTYICNVNHKPSNTKVDKKVEPKSCDKTHTCPPCPAPPVAGPSVFLFPPKPKDTLMISRTPEVTCVVVDVKHEDPEVKFNWYVDGVEVHNAKTKPREEQYNSTYRVVSVLTVLHQDWLNGKEYKCKVSNKALPAPIEKTISKAKGQPREPQVYTLPPSREEMTKNQVSLTCLVKGFYPSDIAVEWESNGQPENNYKTTPPVLDSDGSFFLYSKLTVDKSRWQQGNVFSCSVMHEALHNHYTQKSLSLSPGK

SEQ ID NO: 1073 - protein, 220 aa, synthetic construct; identical to SEQ ID NO: 484
  source 1..220: note = XENP45765 Chain 2- STEAP-A[STEAP1]_L1_Light Chain

SEQ ID NO: 1074 - protein, 453 aa, synthetic construct
  source 1..453: note = XENP45766 Chain 1- STEAP-A[STEAP1]_H1.173_IgG1_PVA_/S267K
QVQVQESGPGLVKPSQTLSLTCTVSGYSITSDYAWNWIRQPPGKKLEWIGYISNSGSTSYNPSLKSRVTISRDTSKNQFSLKLSSVTAADTAVYYCARERNYDYERYYYAMDYWGQGTLVTVSSASTKGPSVFPLAPSSKSTSGGTAALGCLVKDYFPEPVTVSWNSGALTSGVHTFPAVLQSSGLYSLSSVVTVPSSSLGTQTYICNVNHKPSNTKVDKKVEPKSCDKTHTCPPCPAPPVAGPSVFLFPPKPKDTLMISRTPEVTCVVVDVKHEDPEVKFNWYVDGVEVHNAKTKPREEQYNSTYRVVSVLTVLHQDWLNGKEYKCKVSNKALPAPIEKTISKAKGQPREPQVYTLPPSREEMTKNQVSLTCLVKGFYPSDIAVEWESNGQPENNYKTTPPVLDSDGSFFLYSKLTVDKSRWQQGNVFSCSVMHEALHNHYTQKSLSLSPGK

SEQ ID NO: 1075 - protein, 220 aa, synthetic construct; identical to SEQ ID NO: 484
  source 1..220: note = XENP45766 Chain 2- STEAP-A[STEAP1]_L1_Light Chain

SEQ ID NO: 1076 - protein, 453 aa, synthetic construct
  source 1..453: note = XENP45767 Chain 1- STEAP-A[STEAP1]_H1.174_IgG1_PVA_/S267K
QVQVQESGPGLVKPSQTLSLTCTVSGYSITSDYAWNWIRQPPGKKLEWIGYISNSGSTSYNPSLKSRVTISRDTSKNQFSLKLSSVTAADTAVYYCARERNYDYESYYYAMDYWGQGTLVTVSSASTKGPSVFPLAPSSKSTSGGTAALGCLVKDYFPEPVTVSWNSGALTSGVHTFPAVLQSSGLYSLSSVVTVPSSSLGTQTYICNVNHKPSNTKVDKKVEPKSCDKTHTCPPCPAPPVAGPSVFLFPPKPKDTLMISRTPEVTCVVVDVKHEDPEVKFNWYVDGVEVHNAKTKPREEQYNSTYRVVSVLTVLHQDWLNGKEYKCKVSNKALPAPIEKTISKAKGQPREPQVYTLPPSREEMTKNQVSLTCLVKGFYPSDIAVEWESNGQPENNYKTTPPVLDSDGSFFLYSKLTVDKSRWQQGNVFSCSVMHEALHNHYTQKSLSLSPGK

SEQ ID NO: 1077 - protein, 220 aa, synthetic construct; identical to SEQ ID NO: 484
  source 1..220: note = XENP45767 Chain 2- STEAP-A[STEAP1]_L1_Light Chain

SEQ ID NO: 1078 - protein, 453 aa, synthetic construct
  source 1..453: note = XENP45768 Chain 1- STEAP-A[STEAP1]_H1.175_IgG1_PVA_/S267K
QVQVQESGPGLVKPSQTLSLTCTVSGYSITSDYAWNWIRQPPGKKLEWIGYISNSGSTSYNPSLKSRVTISRDTSKNQFSLKLSSVTAADTAVYYCARERNYDYEVYYYAMDYWGQGTLVTVSSASTKGPSVFPLAPSSKSTSGGTAALGCLVKDYFPEPVTVSWNSGALTSGVHTFPAVLQSSGLYSLSSVVTVPSSSLGTQTYICNVNHKPSNTKVDKKVEPKSCDKTHTCPPCPAPPVAGPSVFLFPPKPKDTLMISRTPEVTCVVVDVKHEDPEVKFNWYVDGVEVHNAKTKPREEQYNSTYRVVSVLTVLHQDWLNGKEYKCKVSNKALPAPIEKTISKAKGQPREPQVYTLPPSREEMTKNQVSLTCLVKGFYPSDIAVEWESNGQPENNYKTTPPVLDSDGSFFLYSKLTVDKSRWQQGNVFSCSVMHEALHNHYTQKSLSLSPGK

SEQ ID NO: 1079 - protein, 220 aa, synthetic construct; identical to SEQ ID NO: 484
  source 1..220: note = XENP45768 Chain 2- STEAP-A[STEAP1]_L1_Light Chain

SEQ ID NO: 1080 - protein, 453 aa, synthetic construct
  source 1..453: note = XENP45769 Chain 1- STEAP-A[STEAP1]_H1.176_IgG1_PVA_/S267K
QVQVQESGPGLVKPSQTLSLTCTVSGYSITSDYAWNWIRQPPGKKLEWIGYISNSGSTSYNPSLKSRVTISRDTSKNQFSLKLSSVTAADTAVYYCARERNYDYDDAYYAMDYWGQGTLVTVSSASTKGPSVFPLAPSSKSTSGGTAALGCLVKDYFPEPVTVSWNSGALTSGVHTFPAVLQSSGLYSLSSVVTVPSSSLGTQTYICNVNHKPSNTKVDKKVEPKSCDKTHTCPPCPAPPVAGPSVFLFPPKPKDTLMISRTPEVTCVVVDVKHEDPEVKFNWYVDGVEVHNAKTKPREEQYNSTYRVVSVLTVLHQDWLNGKEYKCKVSNKALPAPIEKTISKAKGQPREPQVYTLPPSREEMTKNQVSLTCLVKGFYPSDIAVEWESNGQPENNYKTTPPVLDSDGSFFLYSKLTVDKSRWQQGNVFSCSVMHEALHNHYTQKSLSLSPGK

SEQ ID NO: 1081 - protein, 220 aa, synthetic construct; identical to SEQ ID NO: 484
  source 1..220: note = XENP45769 Chain 2- STEAP-A[STEAP1]_L1_Light Chain

SEQ ID NO: 1082 - protein, 453 aa, synthetic construct
  source 1..453: note = XENP45770 Chain 1- STEAP-A[STEAP1]_H1.177_IgG1_PVA_/S267K
QVQVQESGPGLVKPSQTLSLTCTVSGYSITSDYAWNWIRQPPGKKLEWIGYISNSGSTSYNPSLKSRVTISRDTSKNQFSLKLSSVTAADTAVYYCARERNYDYDDFYYAMDYWGQGTLVTVSSASTKGPSVFPLAPSSKSTSGGTAALGCLVKDYFPEPVTVSWNSGALTSGVHTFPAVLQSSGLYSLSSVVTVPSSSLGTQTYICNVNHKPSNTKVDKKVEPKSCDKTHTCPPCPAPPVAGPSVFLFPPKPKDTLMISRTPEVTCVVVDVKHEDPEVKFNWYVDGVEVHNAKTKPREEQYNSTYRVVSVLTVLHQDWLNGKEYKCKVSNKALPAPIEKTISKAKGQPREPQVYTLPPSREEMTKNQVSLTCLVKGFYPSDIAVEWESNGQPENNYKTTPPVLDSDGSFFLYSKLTVDKSRWQQGNVFSCSVMHEALHNHYTQKSLSLSPGK

SEQ ID NO: 1083 - protein, 220 aa, synthetic construct; identical to SEQ ID NO: 484
  source 1..220: note = XENP45770 Chain 2- STEAP-A[STEAP1]_L1_Light Chain

SEQ ID NO: 1084 - protein, 453 aa, synthetic construct
  source 1..453: note = XENP45771 Chain 1- STEAP-A[STEAP1]_H1.178_IgG1_PVA_/S267K
QVQVQESGPGLVKPSQTLSLTCTVSGYSITSDYAWNWIRQPPGKKLEWIGYISNSGSTSYNPSLKSRVTISRDTSKNQFSLKLSSVTAADTAVYYCARERNYDYDDHYYAMDYWGQGTLVTVSSASTKGPSVFPLAPSSKSTSGGTAALGCLVKDYFPEPVTVSWNSGALTSGVHTFPAVLQSSGLYSLSSVVTVPSSSLGTQTYICNVNHKPSNTKVDKKVEPKSCDKTHTCPPCPAPPVAGPSVFLFPPKPKDTLMISRTPEVTCVVVDVKHEDPEVKFNWYVDGVEVHNAKTKPREEQYNSTYRVVSVLTVLHQDWLNGKEYKCKVSNKALPAPIEKTISKAKGQPREPQVYTLPPSREEMTKNQVSLTCLVKGFYPSDIAVEWESNGQPENNYKTTPPVLDSDGSFFLYSKLTVDKSRWQQGNVFSCSVMHEALHNHYTQKSLSLSPGK

SEQ ID NO: 1085 - protein, 220 aa, synthetic construct; identical to SEQ ID NO: 484
  source 1..220: note = XENP45771 Chain 2- STEAP-A[STEAP1]_L1_Light Chain

SEQ ID NO: 1086 - protein, 453 aa, synthetic construct
  source 1..453: note = XENP45772 Chain 1- STEAP-A[STEAP1]_H1.179_IgG1_PVA_/S267K
QVQVQESGPGLVKPSQTLSLTCTVSGYSITSDYAWNWIRQPPGKKLEWIGYISNSGSTSYNPSLKSRVTISRDTSKNQFSLKLSSVTAADTAVYYCARERNYDYDDKYYAMDYWGQGTLVTVSSASTKGPSVFPLAPSSKSTSGGTAALGCLVKDYFPEPVTVSWNSGALTSGVHTFPAVLQSSGLYSLSSVVTVPSSSLGTQTYICNVNHKPSNTKVDKKVEPKSCDKTHTCPPCPAPPVAGPSVFLFPPKPKDTLMISRTPEVTCVVVDVKHEDPEVKFNWYVDGVEVHNAKTKPREEQYNSTYRVVSVLTVLHQDWLNGKEYKCKVSNKALPAPIEKTISKAKGQPREPQVYTLPPSREEMTKNQVSLTCLVKGFYPSDIAVEWESNGQPENNYKTTPPVLDSDGSFFLYSKLTVDKSRWQQGNVFSCSVMHEALHNHYTQKSLSLSPGK

SEQ ID NO: 1087 - protein, 220 aa, synthetic construct; identical to SEQ ID NO: 484
  source 1..220: note = XENP45772 Chain 2- STEAP-A[STEAP1]_L1_Light Chain

SEQ ID NO: 1088 - protein, 453 aa, synthetic construct
  source 1..453: note = XENP45773 Chain 1- STEAP-A[STEAP1]_H1.180_IgG1_PVA_/S267K
QVQVQESGPGLVKPSQTLSLTCTVSGYSITSDYAWNWIRQPPGKKLEWIGYISNSGSTSYNPSLKSRVTISRDTSKNQFSLKLSSVTAADTAVYYCARERNYDYDDLYYAMDYWGQGTLVTVSSASTKGPSVFPLAPSSKSTSGGTAALGCLVKDYFPEPVTVSWNSGALTSGVHTFPAVLQSSGLYSLSSVVTVPSSSLGTQTYICNVNHKPSNTKVDKKVEPKSCDKTHTCPPCPAPPVAGPSVFLFPPKPKDTLMISRTPEVTCVVVDVKHEDPEVKFNWYVDGVEVHNAKTKPREEQYNSTYRVVSVLTVLHQDWLNGKEYKCKVSNKALPAPIEKTISKAKGQPREPQVYTLPPSREEMTKNQVSLTCLVKGFYPSDIAVEWESNGQPENNYKTTPPVLDSDGSFFLYSKLTVDKSRWQQGNVFSCSVMHEALHNHYTQKSLSLSPGK

SEQ ID NO: 1089 - protein, 220 aa, synthetic construct; identical to SEQ ID NO: 484
  source 1..220: note = XENP45773 Chain 2- STEAP-A[STEAP1]_L1_Light Chain

SEQ ID NO: 1090 - protein, 453 aa, synthetic construct
  source 1..453: note = XENP45774 Chain 1- STEAP-A[STEAP1]_H1.181_IgG1_PVA_/S267K
QVQVQESGPGLVKPSQTLSLTCTVSGYSITSDYAWNWIRQPPGKKLEWIGYISNSGSTSYNPSLKSRVTISRDTSKNQFSLKLSSVTAADTAVYYCARERNYDYDDQYYAMDYWGQGTLVTVSSASTKGPSVFPLAPSSKSTSGGTAALGCLVKDYFPEPVTVSWNSGALTSGVHTFPAVLQSSGLYSLSSVVTVPSSSLGTQTYICNVNHKPSNTKVDKKVEPKSCDKTHTCPPCPAPPVAGPSVFLFPPKPKDTLMISRTPEVTCVVVDVKHEDPEVKFNWYVDGVEVHNAKTKPREEQYNSTYRVVSVLTVLHQDWLNGKEYKCKVSNKALPAPIEKTISKAKGQPREPQVYTLPPSREEMTKNQVSLTCLVKGFYPSDIAVEWESNGQPENNYKTTPPVLDSDGSFFLYSKLTVDKSRWQQGNVFSCSVMHEALHNHYTQKSLSLSPGK

SEQ ID NO: 1091 - protein, 220 aa, synthetic construct; identical to SEQ ID NO: 484
  source 1..220: note = XENP45774 Chain 2- STEAP-A[STEAP1]_L1_Light Chain

SEQ ID NO: 1092 - protein, 453 aa, synthetic construct
  source 1..453: note = XENP45775 Chain 1- STEAP-A[STEAP1]_H1.182_IgG1_PVA_/S267K
QVQVQESGPGLVKPSQTLSLTCTVSGYSITSDYAWNWIRQPPGKKLEWIGYISNSGSTSYNPSLKSRVTISRDTSKNQFSLKLSSVTAADTAVYYCARERNYDYDDVYYAMDYWGQGTLVTVSSASTKGPSVFPLAPSSKSTSGGTAALGCLVKDYFPEPVTVSWNSGALTSGVHTFPAVLQSSGLYSLSSVVTVPSSSLGTQTYICNVNHKPSNTKVDKKVEPKSCDKTHTCPPCPAPPVAGPSVFLFPPKPKDTLMISRTPEVTCVVVDVKHEDPEVKFNWYVDGVEVHNAKTKPREEQYNSTYRVVSVLTVLHQDWLNGKEYKCKVSNKALPAPIEKTISKAKGQPREPQVYTLPPSREEMTKNQVSLTCLVKGFYPSDIAVEWESNGQPENNYKTTPPVLDSDGSFFLYSKLTVDKSRWQQGNVFSCSVMHEALHNHYTQKSLSLSPGK

SEQ ID NO: 1093 - protein, 220 aa, synthetic construct; identical to SEQ ID NO: 484
  source 1..220: note = XENP45775 Chain 2- STEAP-A[STEAP1]_L1_Light Chain

SEQ ID NO: 1094 - protein, 453 aa, synthetic construct
  source 1..453: note = XENP45776 Chain 1- STEAP-A[STEAP1]_H1.183_IgG1_PVA_/S267K
QVQVQESGPGLVKPSQTLSLTCTVSGYSITSDYAWNWIRQPPGKKLEWIGYISNSGSTSYNPSLKSRVTISRDTSKNQFSLKLSSVTAADTAVYYCARERNYDYDDYAYAMDYWGQGTLVTVSSASTKGPSVFPLAPSSKSTSGGTAALGCLVKDYFPEPVTVSWNSGALTSGVHTFPAVLQSSGLYSLSSVVTVPSSSLGTQTYICNVNHKPSNTKVDKKVEPKSCDKTHTCPPCPAPPVAGPSVFLFPPKPKDTLMISRTPEVTCVVVDVKHEDPEVKFNWYVDGVEVHNAKTKPREEQYNSTYRVVSVLTVLHQDWLNGKEYKCKVSNKALPAPIEKTISKAKGQPREPQVYTLPPSREEMTKNQVSLTCLVKGFYPSDIAVEWESNGQPENNYKTTPPVLDSDGSFFLYSKLTVDKSRWQQGNVFSCSVMHEALHNHYTQKSLSLSPGK

SEQ ID NO: 1095 - protein, 220 aa, synthetic construct; identical to SEQ ID NO: 484
  source 1..220: note = XENP45776 Chain 2- STEAP-A[STEAP1]_L1_Light Chain

SEQ ID NO: 1096 - protein, 453 aa, synthetic construct
  source 1..453: note = XENP45777 Chain 1- STEAP-A[STEAP1]_H1.184_IgG1_PVA_/S267K
QVQVQESGPGLVKPSQTLSLTCTVSGYSITSDYAWNWIRQPPGKKLEWIGYISNSGSTSYNPSLKSRVTISRDTSKNQFSLKLSSVTAADTAVYYCARERNYDYDDYFYAMDYWGQGTLVTVSSASTKGPSVFPLAPSSKSTSGGTAALGCLVKDYFPEPVTVSWNSGALTSGVHTFPAVLQSSGLYSLSSVVTVPSSSLGTQTYICNVNHKPSNTKVDKKVEPKSCDKTHTCPPCPAPPVAGPSVFLFPPKPKDTLMISRTPEVTCVVVDVKHEDPEVKFNWYVDGVEVHNAKTKPREEQYNSTYRVVSVLTVLHQDWLNGKEYKCKVSNKALPAPIEKTISKAKGQPREPQVYTLPPSREEMTKNQVSLTCLVKGFYPSDIAVEWESNGQPENNYKTTPPVLDSDGSFFLYSKLTVDKSRWQQGNVFSCSVMHEALHNHYTQKSLSLSPGK

SEQ ID NO: 1097 - protein, 220 aa, synthetic construct; identical to SEQ ID NO: 484
  source 1..220: note = XENP45777 Chain 2- STEAP-A[STEAP1]_L1_Light Chain

SEQ ID NO: 1098 - protein, 453 aa, synthetic construct
  source 1..453: note = XENP45778 Chain 1- STEAP-A[STEAP1]_H1.185_IgG1_PVA_/S267K
QVQVQESGPGLVKPSQTLSLTCTVSGYSITSDYAWNWIRQPPGKKLEWIGYISNSGSTSYNPSLKSRVTISRDTSKNQFSLKLSSVTAADTAVYYCARERNYDYDDYHYAMDYWGQGTLVTVSSASTKGPSVFPLAPSSKSTSGGTAALGCLVKDYFPEPVTVSWNSGALTSGVHTFPAVLQSSGLYSLSSVVTVPSSSLGTQTYICNVNHKPSNTKVDKKVEPKSCDKTHTCPPCPAPPVAGPSVFLFPPKPKDTLMISRTPEVTCVVVDVKHEDPEVKFNWYVDGVEVHNAKTKPREEQYNSTYRVVSVLTVLHQDWLNGKEYKCKVSNKALPAPIEKTISKAKGQPREPQVYTLPPSREEMTKNQVSLTCLVKGFYPSDIAVEWESNGQPENNYKTTPPVLDSDGSFFLYSKLTVDKSRWQQGNVFSCSVMHEALHNHYTQKSLSLSPGK

SEQ ID NO: 1099 - protein, 220 aa, synthetic construct; identical to SEQ ID NO: 484
  source 1..220: note = XENP45778 Chain 2- STEAP-A[STEAP1]_L1_Light Chain

SEQ ID NO: 1100 - protein, 453 aa, synthetic construct
  source 1..453: note = XENP45779 Chain 1- STEAP-A[STEAP1]_H1.186_IgG1_PVA_/S267K
QVQVQESGPGLVKPSQTLSLTCTVSGYSITSDYAWNWIRQPPGKKLEWIGYISNSGSTSYNPSLKSRVTISRDTSKNQFSLKLSSVTAADTAVYYCARERNYDYDDYKYAMDYWGQGTLVTVSSASTKGPSVFPLAPSSKSTSGGTAALGCLVKDYFPEPVTVSWNSGALTSGVHTFPAVLQSSGLYSLSSVVTVPSSSLGTQTYICNVNHKPSNTKVDKKVEPKSCDKTHTCPPCPAPPVAGPSVFLFPPKPKDTLMISRTPEVTCVVVDVKHEDPEVKFNWYVDGVEVHNAKTKPREEQYNSTYRVVSVLTVLHQDWLNGKEYKCKVSNKALPAPIEKTISKAKGQPREPQVYTLPPSREEMTKNQVSLTCLVKGFYPSDIAVEWESNGQPENNYKTTPPVLDSDGSFFLYSKLTVDKSRWQQGNVFSCSVMHEALHNHYTQKSLSLSPGK

SEQ ID NO: 1101 - protein, 220 aa, synthetic construct; identical to SEQ ID NO: 484
  source 1..220: note = XENP45779 Chain 2- STEAP-A[STEAP1]_L1_Light Chain

SEQ ID NO: 1102 - protein, 453 aa, synthetic construct
  source 1..453: note = XENP45780 Chain 1- STEAP-A[STEAP1]_H1.187_IgG1_PVA_/S267K
QVQVQESGPGLVKPSQTLSLTCTVSGYSITSDYAWNWIRQPPGKKLEWIGYISNSGSTSYNPSLKSRVTISRDTSKNQFSLKLSSVTAADTAVYYCARERNYDYDDYLYAMDYWGQGTLVTVSSASTKGPSVFPLAPSSKSTSGGTAALGCLVKDYFPEPVTVSWNSGALTSGVHTFPAVLQSSGLYSLSSVVTVPSSSLGTQTYICNVNHKPSNTKVDKKVEPKSCDKTHTCPPCPAPPVAGPSVFLFPPKPKDTLMISRTPEVTCVVVDVKHEDPEVKFNWYVDGVEVHNAKTKPREEQYNSTYRVVSVLTVLHQDWLNGKEYKCKVSNKALPAPIEKTISKAKGQPREPQVYTLPPSREEMTKNQVSLTCLVKGFYPSDIAVEWESNGQPENNYKTTPPVLDSDGSFFLYSKLTVDKSRWQQGNVFSCSVMHEALHNHYTQKSLSLSPGK

SEQ ID NO: 1103 - protein, 220 aa, synthetic construct; identical to SEQ ID NO: 484
  source 1..220: note = XENP45780 Chain 2- STEAP-A[STEAP1]_L1_Light Chain

SEQ ID NO: 1104 - protein, 453 aa, synthetic construct
  source 1..453: note = XENP45781 Chain 1- STEAP-A[STEAP1]_H1.188_IgG1_PVA_/S267K
QVQVQESGPGLVKPSQTLSLTCTVSGYSITSDYAWNWIRQPPGKKLEWIGYISNSGSTSYNPSLKSRVTISRDTSKNQFSLKLSSVTAADTAVYYCARERNYDYDDYQYAMDYWGQGTLVTVSSASTKGPSVFPLAPSSKSTSGGTAALGCLVKDYFPEPVTVSWNSGALTSGVHTFPAVLQSSGLYSLSSVVTVPSSSLGTQTYICNVNHKPSNTKVDKKVEPKSCDKTHTCPPCPAPPVAGPSVFLFPPKPKDTLMISRTPEVTCVVVDVKHEDPEVKFNWYVDGVEVHNAKTKPREEQYNSTYRVVSVLTVLHQDWLNGKEYKCKVSNKALPAPIEKTISKAKGQPREPQVYTLPPSREEMTKNQVSLTCLVKGFYPSDIAVEWESNGQPENNYKTTPPVLDSDGSFFLYSKLTVDKSRWQQGNVFSCSVMHEALHNHYTQKSLSLSPGK

SEQ ID NO: 1105 - protein, 220 aa, synthetic construct; identical to SEQ ID NO: 484
  source 1..220: note = XENP45781 Chain 2- STEAP-A[STEAP1]_L1_Light Chain

SEQ ID NO: 1106 - protein, 453 aa, synthetic construct
  source 1..453: note = XENP45782 Chain 1- STEAP-A[STEAP1]_H1.189_IgG1_PVA_/S267K
QVQVQESGPGLVKPSQTLSLTCTVSGYSITSDYAWNWIRQPPGKKLEWIGYISNSGSTSYNPSLKSRVTISRDTSKNQFSLKLSSVTAADTAVYYCARERNYDYDDYVYAMDYWGQGTLVTVSSASTKGPSVFPLAPSSKSTSGGTAALGCLVKDYFPEPVTVSWNSGALTSGVHTFPAVLQSSGLYSLSSVVTVPSSSLGTQTYICNVNHKPSNTKVDKKVEPKSCDKTHTCPPCPAPPVAGPSVFLFPPKPKDTLMISRTPEVTCVVVDVKHEDPEVKFNWYVDGVEVHNAKTKPREEQYNSTYRVVSVLTVLHQDWLNGKEYKCKVSNKALPAPIEKTISKAKGQPREPQVYTLPPSREEMTKNQVSLTCLVKGFYPSDIAVEWESNGQPENNYKTTPPVLDSDGSFFLYSKLTVDKSRWQQGNVFSCSVMHEALHNHYTQKSLSLSPGK

SEQ ID NO: 1107 - protein, 220 aa, synthetic construct; identical to SEQ ID NO: 484
  source 1..220: note = XENP45782 Chain 2- STEAP-A[STEAP1]_L1_Light Chain

SEQ ID NO: 1108 - protein, 453 aa, synthetic construct; identical to SEQ ID NO: 716
  source 1..453: note = XENP45783 Chain 1- STEAP-A[STEAP1]_H1_IgG1_PVA_/S267K

SEQ ID NO: 1109 - protein, 220 aa, synthetic construct
  source 1..220: note = XENP45783 Chain 2- STEAP-A[STEAP1]_L1.4_Light Chain
DIVMTQSPDSLAVSLGERATINCKSSQALLYRSNQKNYLAWYQQKPGQSPKLLIYWASTRESGVPDRFTGSGSGTDFTLTISSLQAEDVAVYYCQQYYNYPRTFGGGTKVEIKRTVAAPSVFIFPPSDEQLKSGTASVVCLLNNFYPREAKVQWKVDNALQSGNSQESVTEQDSKDSTYSLSSTLTLSKADYEKHKVYACEVTHQGLSSPVTKSFNRGEC

SEQ ID NO: 1110 - protein, 453 aa, synthetic construct; identical to SEQ ID NO: 716
  source 1..453: note = XENP45784 Chain 1- STEAP-A[STEAP1]_H1_IgG1_PVA_/S267K

SEQ ID NO: 1111 - protein, 220 aa, synthetic construct
  source 1..220: note = XENP45784 Chain 2- STEAP-A[STEAP1]_L1.5_Light Chain
DIVMTQSPDSLAVSLGERATINCKSSQDLLYRSNQKNYLAWYQQKPGQSPKLLIYWASTRESGVPDRFTGSGSGTDFTLTISSLQAEDVAVYYCQQYYNYPRTFGGGTKVEIKRTVAAPSVFIFPPSDEQLKSGTASVVCLLNNFYPREAKVQWKVDNALQSGNSQESVTEQDSKDSTYSLSSTLTLSKADYEKHKVYACEVTHQGLSSPVTKSFNRGEC

SEQ ID NO: 1112 - protein, 453 aa, synthetic construct; identical to SEQ ID NO: 716
  source 1..453: note = XENP45785 Chain 1- STEAP-A[STEAP1]_H1_IgG1_PVA_/S267K

SEQ ID NO: 1113 - protein, 220 aa, synthetic construct
  source 1..220: note = XENP45785 Chain 2- STEAP-A[STEAP1]_L1.6_Light Chain
DIVMTQSPDSLAVSLGERATINCKSSQGLLYRSNQKNYLAWYQQKPGQSPKLLIYWASTRESGVPDRFTGSGSGTDFTLTISSLQAEDVAVYYCQQYYNYPRTFGGGTKVEIKRTVAAPSVFIFPPSDEQLKSGTASVVCLLNNFYPREAKVQWKVDNALQSGNSQESVTEQDSKDSTYSLSSTLTLSKADYEKHKVYACEVTHQGLSSPVTKSFNRGEC

SEQ ID NO: 1114 - protein, 453 aa, synthetic construct; identical to SEQ ID NO: 716
  source 1..453: note = XENP45786 Chain 1- STEAP-A[STEAP1]_H1_IgG1_PVA_/S267K

SEQ ID NO: 1115 - protein, 220 aa, synthetic construct
  source 1..220: note = XENP45786 Chain 2- STEAP-A[STEAP1]_L1.7_Light Chain
DIVMTQSPDSLAVSLGERATINCKSSQHLLYRSNQKNYLAWYQQKPGQSPKLLIYWASTRESGVPDRFTGSGSGTDFTLTISSLQAEDVAVYYCQQYYNYPRTFGGGTKVEIKRTVAAPSVFIFPPSDEQLKSGTASVVCLLNNFYPREAKVQWKVDNALQSGNSQESVTEQDSKDSTYSLSSTLTLSKADYEKHKVYACEVTHQGLSSPVTKSFNRGEC

SEQ ID NO: 1116 - protein, 453 aa, synthetic construct; identical to SEQ ID NO: 716
  source 1..453: note = XENP45787 Chain 1- STEAP-A[STEAP1]_H1_IgG1_PVA_/S267K

SEQ ID NO: 1117 - protein, 220 aa, synthetic construct
  source 1..220: note = XENP45787 Chain 2- STEAP-A[STEAP1]_L1.8_Light Chain
DIVMTQSPDSLAVSLGERATINCKSSQKLLYRSNQKNYLAWYQQKPGQSPKLLIYWASTRESGVPDRFTGSGSGTDFTLTISSLQAEDVAVYYCQQYYNYPRTFGGGTKVEIKRTVAAPSVFIFPPSDEQLKSGTASVVCLLNNFYPREAKVQWKVDNALQSGNSQESVTEQDSKDSTYSLSSTLTLSKADYEKHKVYACEVTHQGLSSPVTKSFNRGEC

SEQ ID NO: 1118 - protein, 453 aa, synthetic construct; identical to SEQ ID NO: 716
  source 1..453: note = XENP45788 Chain 1- STEAP-A[STEAP1]_H1_IgG1_PVA_/S267K

SEQ ID NO: 1119 - protein, 220 aa, synthetic construct
  source 1..220: note = XENP45788 Chain 2- STEAP-A[STEAP1]_L1.9_Light Chain
DIVMTQSPDSLAVSLGERATINCKSSQQLLYRSNQKNYLAWYQQKPGQSPKLLIYWASTRESGVPDRFTGSGSGTDFTLTISSLQAEDVAVYYCQQYYNYPRTFGGGTKVEIKRTVAAPSVFIFPPSDEQLKSGTASVVCLLNNFYPREAKVQWKVDNALQSGNSQESVTEQDSKDSTYSLSSTLTLSKADYEKHKVYACEVTHQGLSSPVTKSFNRGEC

SEQ ID NO: 1120 - protein, 453 aa, synthetic construct; identical to SEQ ID NO: 716
  source 1..453: note = XENP45789 Chain 1- STEAP-A[STEAP1]_H1_IgG1_PVA_/S267K

SEQ ID NO: 1121 - protein, 220 aa, synthetic construct
  source 1..220: note = XENP45789 Chain 2- STEAP-A[STEAP1]_L1.10_Light Chain
DIVMTQSPDSLAVSLGERATINCKSSQTLLYRSNQKNYLAWYQQKPGQSPKLLIYWASTRESGVPDRFTGSGSGTDFTLTISSLQAEDVAVYYCQQYYNYPRTFGGGTKVEIKRTVAAPSVFIFPPSDEQLKSGTASVVCLLNNFYPREAKVQWKVDNALQSGNSQESVTEQDSKDSTYSLSSTLTLSKADYEKHKVYACEVTHQGLSSPVTKSFNRGEC

SEQ ID NO: 1122 - protein, 453 aa, synthetic construct; identical to SEQ ID NO: 716
  source 1..453: note = XENP45790 Chain 1- STEAP-A[STEAP1]_H1_IgG1_PVA_/S267K

SEQ ID NO: 1123 - protein, 220 aa, synthetic construct
  source 1..220: note = XENP45790 Chain 2- STEAP-A[STEAP1]_L1.11_Light Chain
DIVMTQSPDSLAVSLGERATINCKSSQVLLYRSNQKNYLAWYQQKPGQSPKLLIYWASTRESGVPDRFTGSGSGTDFTLTISSLQAEDVAVYYCQQYYNYPRTFGGGTKVEIKRTVAAPSVFIFPPSDEQLKSGTASVVCLLNNFYPREAKVQWKVDNALQSGNSQESVTEQDSKDSTYSLSSTLTLSKADYEKHKVYACEVTHQGLSSPVTKSFNRGEC

SEQ ID NO: 1124 - protein, 453 aa, synthetic construct; identical to SEQ ID NO: 716
  source 1..453: note = XENP45791 Chain 1- STEAP-A[STEAP1]_H1_IgG1_PVA_/S267K

SEQ ID NO: 1125 - protein, 220 aa, synthetic construct
  source 1..220: note = XENP45791 Chain 2- STEAP-A[STEAP1]_L1.12_Light Chain
DIVMTQSPDSLAVSLGERATINCKSSQYLLYRSNQKNYLAWYQQKPGQSPKLLIYWASTRESGVPDRFTGSGSGTDFTLTISSLQAEDVAVYYCQQYYNYPRTFGGGTKVEIKRTVAAPSVFIFPPSDEQLKSGTASVVCLLNNFYPREAKVQWKVDNALQSGNSQESVTEQDSKDSTYSLSSTLTLSKADYEKHKVYACEVTHQGLSSPVTKSFNRGEC

SEQ ID NO: 1126 - protein, 453 aa, synthetic construct; identical to SEQ ID NO: 716
  source 1..453: note = XENP45792 Chain 1- STEAP-A[STEAP1]_H1_IgG1_PVA_/S267K

SEQ ID NO: 1127 - protein, 220 aa, synthetic construct
  source 1..220: note = XENP45792 Chain 2- STEAP-A[STEAP1]_L1.13_Light Chain
DIVMTQSPDSLAVSLGERATINCKSSQSLLERSNQKNYLAWYQQKPGQSPKLLIYWASTRESGVPDRFTGSGSGTDFTLTISSLQAEDVAVYYCQQYYNYPRTFGGGTKVEIKRTVAAPSVFIFPPSDEQLKSGTASVVCLLNNFYPREAKVQWKVDNALQSGNSQESVTEQDSKDSTYSLSSTLTLSKADYEKHKVYACEVTHQGLSSPVTKSFNRGEC

SEQ ID NO: 1128 - protein, 453 aa, synthetic construct; identical to SEQ ID NO: 716
  source 1..453: note = XENP45793 Chain 1- STEAP-A[STEAP1]_H1_IgG1_PVA_/S267K

SEQ ID NO: 1129 - protein, 220 aa, synthetic construct
  source 1..220: note = XENP45793 Chain 2- STEAP-A[STEAP1]_L1.14_Light Chain
DIVMTQSPDSLAVSLGERATINCKSSQSLLFRSNQKNYLAWYQQKPGQSPKLLIYWASTRESGVPDRFTGSGSGTDFTLTISSLQAEDVAVYYCQQYYNYPRTFGGGTKVEIKRTVAAPSVFIFPPSDEQLKSGTASVVCLLNNFYPREAKVQWKVDNALQSGNSQESVTEQDSKDSTYSLSSTLTLSKADYEKHKVYACEVTHQGLSSPVTKSFNRGEC

SEQ ID NO: 1130 - protein, 453 aa, synthetic construct; identical to SEQ ID NO: 716
  source 1..453: note = XENP45794 Chain 1- STEAP-A[STEAP1]_H1_IgG1_PVA_/S267K

SEQ ID NO: 1131 - protein, 220 aa, synthetic construct
  source 1..220: note = XENP45794 Chain 2- STEAP-A[STEAP1]_L1.15_Light Chain
DIVMTQSPDSLAVSLGERATINCKSSQSLLHRSNQKNYLAWYQQKPGQSPKLLIYWASTRESGVPDRFTGSGSGTDFTLTISSLQAEDVAVYYCQQYYNYPRTFGGGTKVEIKRTVAAPSVFIFPPSDEQLKSGTASVVCLLNNFYPREAKVQWKVDNALQSGNSQESVTEQDSKDSTYSLSSTLTLSKADYEKHKVYACEVTHQGLSSPVTKSFNRGEC

SEQ ID NO: 1132 - protein, 453 aa, synthetic construct; identical to SEQ ID NO: 716
  source 1..453: note = XENP45795 Chain 1- STEAP-A[STEAP1]_H1_IgG1_PVA_/S267K

SEQ ID NO: 1133 - protein, 220 aa, synthetic construct
  source 1..220: note = XENP45795 Chain 2- STEAP-A[STEAP1]_L1.16_Light Chain
DIVMTQSPDSLAVSLGERATINCKSSQSLLQRSNQKNYLAWYQQKPGQSPKLLIYWASTRESGVPDRFTGSGSGTDFTLTISSLQAEDVAVYYCQQYYNYPRTFGGGTKVEIKRTVAAPSVFIFPPSDEQLKSGTASVVCLLNNFYPREAKVQWKVDNALQSGNSQESVTEQDSKDSTYSLSSTLTLSKADYEKHKVYACEVTHQGLSSPVTKSFNRGEC

SEQ ID NO: 1134 - protein, 453 aa, synthetic construct; identical to SEQ ID NO: 716
  source 1..453: note = XENP45796 Chain 1- STEAP-A[STEAP1]_H1_IgG1_PVA_/S267K

SEQ ID NO: 1135 - protein, 220 aa, synthetic construct
  source 1..220: note = XENP45796 Chain 2- STEAP-A[STEAP1]_L1.17_Light Chain
DIVMTQSPDSLAVSLGERATINCKSSQSLLRRSNQKNYLAWYQQKPGQSPKLLIYWASTRESGVPDRFTGSGSGTDFTLTISSLQAEDVAVYYCQQYYNYPRTFGGGTKVEIKRTVAAPSVFIFPPSDEQLKSGTASVVCLLNNFYPREAKVQWKVDNALQSGNSQESVTEQDSKDSTYSLSSTLTLSKADYEKHKVYACEVTHQGLSSPVTKSFNRGEC

SEQ ID NO: 1136 - protein, 453 aa, synthetic construct; identical to SEQ ID NO: 716
  source 1..453: note = XENP45797 Chain 1- STEAP-A[STEAP1]_H1_IgG1_PVA_/S267K

SEQ ID NO: 1137 - protein, 220 aa, synthetic construct
  source 1..220: note = XENP45797 Chain 2- STEAP-A[STEAP1]_L1.18_Light Chain
DIVMTQSPDSLAVSLGERATINCKSSQSLLYESNQKNYLAWYQQKPGQSPKLLIYWASTRESGVPDRFTGSGSGTDFTLTISSLQAEDVAVYYCQQYYNYPRTFGGGTKVEIKRTVAAPSVFIFPPSDEQLKSGTASVVCLLNNFYPREAKVQWKVDNALQSGNSQESVTEQDSKDSTYSLSSTLTLSKADYEKHKVYACEVTHQGLSSPVTKSFNRGEC

SEQ ID NO: 1138 - protein, 453 aa, synthetic construct; identical to SEQ ID NO: 716
  source 1..453: note = XENP45798 Chain 1- STEAP-A[STEAP1]_H1_IgG1_PVA_/S267K

SEQ ID NO: 1139 - protein, 220 aa, synthetic construct
  source 1..220: note = XENP45798 Chain 2- STEAP-A[STEAP1]_L1.19_Light Chain
DIVMTQSPDSLAVSLGERATINCKSSQSLLYKSNQKNYLAWYQQKPGQSPKLLIYWASTRESGVPDRFTGSGSGTDFTLTISSLQAEDVAVYYCQQYYNYPRTFGGGTKVEIKRTVAAPSVFIFPPSDEQLKSGTASVVCLLNNFYPREAKVQWKVDNALQSGNSQESVTEQDSKDSTYSLSSTLTLSKADYEKHKVYACEVTHQGLSSPVTKSFNRGEC

SEQ ID NO: 1140 - protein, 453 aa, synthetic construct; identical to SEQ ID NO: 716
  source 1..453: note = XENP45799 Chain 1- STEAP-A[STEAP1]_H1_IgG1_PVA_/S267K

SEQ ID NO: 1141 - protein, 220 aa, synthetic construct
  source 1..220: note = XENP45799 Chain 2- STEAP-A[STEAP1]_L1.20_Light Chain
DIVMTQSPDSLAVSLGERATINCKSSQSLLYLSNQKNYLAWYQQKPGQSPKLLIYWASTRESGVPDRFTGSGSGTDFTLTISSLQAEDVAVYYCQQYYNYPRTFGGGTKVEIKRTVAAPSVFIFPPSDEQLKSGTASVVCLLNNFYPREAKVQWKVDNALQSGNSQESVTEQDSKDSTYSLSSTLTLSKADYEKHKVYACEVTHQGLSSPVTKSFNRGEC

SEQ ID NO: 1142 - protein, 453 aa, synthetic construct; identical to SEQ ID NO: 716
  source 1..453: note = XENP45800 Chain 1- STEAP-A[STEAP1]_H1_IgG1_PVA_/S267K

SEQ ID NO: 1143 - protein, 220 aa, synthetic construct
  source 1..220: note = XENP45800 Chain 2- STEAP-A[STEAP1]_L1.21_Light Chain
DIVMTQSPDSLAVSLGERATINCKSSQSLLYQSNQKNYLAWYQQKPGQSPKLLIYWASTRESGVPDRFTGSGSGTDFTLTISSLQAEDVAVYYCQQYYNYPRTFGGGTKVEIKRTVAAPSVFIFPPSDEQLKSGTASVVCLLNNFYPREAKVQWKVDNALQSGNSQESVTEQDSKDSTYSLSSTLTLSKADYEKHKVYACEVTHQGLSSPVTKSFNRGEC

SEQ ID NO: 1144 - protein, 453 aa, synthetic construct; identical to SEQ ID NO: 716
  source 1..453: note = XENP45801 Chain 1- STEAP-A[STEAP1]_H1_IgG1_PVA_/S267K

SEQ ID NO: 1145 - protein, 220 aa, synthetic construct
  source 1..220: note = XENP45801 Chain 2- STEAP-A[STEAP1]_L1.22_Light Chain
DIVMTQSPDSLAVSLGERATINCKSSQSLLYSSNQKNYLAWYQQKPGQSPKLLIYWASTRESGVPDRFTGSGSGTDFTLTISSLQAEDVAVYYCQQYYNYPRTFGGGTKVEIKRTVAAPSVFIFPPSDEQLKSGTASVVCLLNNFYPREAKVQWKVDNALQSGNSQESVTEQDSKDSTYSLSSTLTLSKADYEKHKVYACEVTHQGLSSPVTKSFNRGEC

SEQ ID NO: 1146 - protein, 453 aa, synthetic construct; identical to SEQ ID NO: 716
  source 1..453: note = XENP45802 Chain 1- STEAP-A[STEAP1]_H1_IgG1_PVA_/S267K

SEQ ID NO: 1147 - protein, 220 aa, synthetic construct
  source 1..220: note = XENP45802 Chain 2- STEAP-A[STEAP1]_L1.23_Light Chain
DIVMTQSPDSLAVSLGERATINCKSSQSLLYRDNQKNYLAWYQQKPGQSPKLLIYWASTRESGVPDRFTGSGSGTDFTLTISSLQAEDVAVYYCQQYYNYPRTFGGGTKVEIKRTVAAPSVFIFPPSDEQLKSGTASVVCLLNNFYPREAKVQWKVDNALQSGNSQESVTEQDSKDSTYSLSSTLTLSKADYEKHKVYACEVTHQGLSSPVTKSFNRGEC

SEQ ID NO: 1148 - protein, 453 aa, synthetic construct; identical to SEQ ID NO: 716
  source 1..453: note = XENP45803 Chain 1- STEAP-A[STEAP1]_H1_IgG1_PVA_/S267K

SEQ ID NO: 1149 - protein, 220 aa, synthetic construct
  source 1..220: note = XENP45803 Chain 2- STEAP-A[STEAP1]_L1.24_Light Chain
DIVMTQSPDSLAVSLGERATINCKSSQSLLYRENQKNYLAWYQQKPGQSPKLLIYWASTRESGVPDRFTGSGSGTDFTLTISSLQAEDVAVYYCQQYYNYPRTFGGGTKVEIKRTVAAPSVFIFPPSDEQLKSGTASVVCLLNNFYPREAKVQWKVDNALQSGNSQESVTEQDSKDSTYSLSSTLTLSKADYEKHKVYACEVTHQGLSSPVTKSFNRGEC

SEQ ID NO: 1150 - protein, 453 aa, synthetic construct; identical to SEQ ID NO: 716
  source 1..453: note = XENP45804 Chain 1- STEAP-A[STEAP1]_H1_IgG1_PVA_/S267K

SEQ ID NO: 1151 - protein, 220 aa, synthetic construct
  source 1..220: note = XENP45804 Chain 2- STEAP-A[STEAP1]_L1.25_Light Chain
DIVMTQSPDSLAVSLGERATINCKSSQSLLYRHNQKNYLAWYQQKPGQSPKLLIYWASTRESGVPDRFTGSGSGTDFTLTISSLQAEDVAVYYCQQYYNYPRTFGGGTKVEIKRTVAAPSVFIFPPSDEQLKSGTASVVCLLNNFYPREAKVQWKVDNALQSGNSQESVTEQDSKDSTYSLSSTLTLSKADYEKHKVYACEVTHQGLSSPVTKSFNRGEC

SEQ ID NO: 1152 - protein, 453 aa, synthetic construct; identical to SEQ ID NO: 716
  source 1..453: note = XENP45805 Chain 1- STEAP-A[STEAP1]_H1_IgG1_PVA_/S267K

SEQ ID NO: 1153 - protein, 220 aa, synthetic construct
  source 1..220: note = XENP45805 Chain 2- STEAP-A[STEAP1]_L1.26_Light Chain
DIVMTQSPDSLAVSLGERATINCKSSQSLLYRINQKNYLAWYQQKPGQSPKLLIYWASTRESGVPDRFTGSGSGTDFTLTISSLQAEDVAVYYCQQYYNYPRTFGGGTKVEIKRTVAAPSVFIFPPSDEQLKSGTASVVCLLNNFYPREAKVQWKVDNALQSGNSQESVTEQDSKDSTYSLSSTLTLSKADYEKHKVYACEVTHQGLSSPVTKSFNRGEC

SEQ ID NO: 1154 - protein, 453 aa, synthetic construct; identical to SEQ ID NO: 716
  source 1..453: note = XENP45806 Chain 1- STEAP-A[STEAP1]_H1_IgG1_PVA_/S267K

SEQ ID NO: 1155 - protein, 220 aa, synthetic construct
  source 1..220: note = XENP45806 Chain 2- STEAP-A[STEAP1]_L1.27_Light Chain
DIVMTQSPDSLAVSLGERATINCKSSQSLLYRKNQKNYLAWYQQKPGQSPKLLIYWASTRESGVPDRFTGSGSGTDFTLTISSLQAEDVAVYYCQQYYNYPRTFGGGTKVEIKRTVAAPSVFIFPPSDEQLKSGTASVVCLLNNFYPREAKVQWKVDNALQSGNSQESVTEQDSKDSTYSLSSTLTLSKADYEKHKVYACEVTHQGLSSPVTKSFNRGEC

SEQ ID NO: 1156 - protein, 453 aa, synthetic construct; identical to SEQ ID NO: 716
  source 1..453: note = XENP45807 Chain 1- STEAP-A[STEAP1]_H1_IgG1_PVA_/S267K

SEQ ID NO: 1157 - protein, 220 aa, synthetic construct
  source 1..220: note = XENP45807 Chain 2- STEAP-A[STEAP1]_L1.28_Light Chain
DIVMTQSPDSLAVSLGERATINCKSSQSLLYRLNQKNYLAWYQQKPGQSPKLLIYWASTRESGVPDRFTGSGSGTDFTLTISSLQAEDVAVYYCQQYYNYPRTFGGGTKVEIKRTVAAPSVFIFPPSDEQLKSGTASVVCLLNNFYPREAKVQWKVDNALQSGNSQESVTEQDSKDSTYSLSSTLTLSKADYEKHKVYACEVTHQGLSSPVTKSFNRGEC

SEQ ID NO: 1158 - protein, 453 aa, synthetic construct; identical to SEQ ID NO: 716
  source 1..453: note = XENP45808 Chain 1- STEAP-A[STEAP1]_H1_IgG1_PVA_/S267K

SEQ ID NO: 1159 - protein, 220 aa, synthetic construct
  source 1..220: note = XENP45808 Chain 2- STEAP-A[STEAP1]_L1.29_Light Chain
DIVMTQSPDSLAVSLGERATINCKSSQSLLYRQNQKNYLAWYQQKPGQSPKLLIYWASTRESGVPDRFTGSGSGTDFTLTISSLQAEDVAVYYCQQYYNYPRTFGGGTKVEIKRTVAAPSVFIFPPSDEQLKSGTASVVCLLNNFYPREAKVQWKVDNALQSGNSQESVTEQDSKDSTYSLSSTLTLSKADYEKHKVYACEVTHQGLSSPVTKSFNRGEC

SEQ ID NO: 1160 - protein, 453 aa, synthetic construct; identical to SEQ ID NO: 716
  source 1..453: note = XENP45809 Chain 1- STEAP-A[STEAP1]_H1_IgG1_PVA_/S267K

SEQ ID NO: 1161 - protein, 220 aa, synthetic construct
  source 1..220: note = XENP45809 Chain 2- STEAP-A[STEAP1]_L1.30_Light Chain
DIVMTQSPDSLAVSLGERATINCKSSQSLLYRTNQKNYLAWYQQKPGQSPKLLIYWASTRESGVPDRFTGSGSGTDFTLTISSLQAEDVAVYYCQQYYNYPRTFGGGTKVEIKRTVAAPSVFIFPPSDEQLKSGTASVVCLLNNFYPREAKVQWKVDNALQSGNSQESVTEQDSKDSTYSLSSTLTLSKADYEKHKVYACEVTHQGLSSPVTKSFNRGEC

SEQ ID NO: 1162 - protein, 453 aa, synthetic construct; identical to SEQ ID NO: 716
  source 1..453: note = XENP45810 Chain 1- STEAP-A[STEAP1]_H1_IgG1_PVA_/S267K

SEQ ID NO: 1163 - protein, 220 aa, synthetic construct
  source 1..220: note = XENP45810 Chain 2- STEAP-A[STEAP1]_L1.31_Light Chain
DIVMTQSPDSLAVSLGERATINCKSSQSLLYRYNQKNYLAWYQQKPGQSPKLLIYWASTRESGVPDRFTGSGSGTDFTLTISSLQAEDVAVYYCQQYYNYPRTFGGGTKVEIKRTVAAPSVFIFPPSDEQLKSGTASVVCLLNNFYPREAKVQWKVDNALQSGNSQESVTEQDSKDSTYSLSSTLTLSKADYEKHKVYACEVTHQGLSSPVTKSFNRGEC

SEQ ID NO: 1164 - protein, 453 aa, synthetic construct; identical to SEQ ID NO: 716
  source 1..453: note = XENP45811 Chain 1- STEAP-A[STEAP1]_H1_IgG1_PVA_/S267K

SEQ ID NO: 1165 - protein, 220 aa, synthetic construct
  source 1..220: note = XENP45811 Chain 2- STEAP-A[STEAP1]_L1.32_Light Chain
DIVMTQSPDSLAVSLGERATINCKSSQSLLYRSDQKNYLAWYQQKPGQSPKLLIYWASTRESGVPDRFTGSGSGTDFTLTISSLQAEDVAVYYCQQYYNYPRTFGGGTKVEIKRTVAAPSVFIFPPSDEQLKSGTASVVCLLNNFYPREAKVQWKVDNALQSGNSQESVTEQDSKDSTYSLSSTLTLSKADYEKHKVYACEVTHQGLSSPVTKSFNRGEC

SEQ ID NO: 1166 - protein, 453 aa, synthetic construct; identical to SEQ ID NO: 716
  source 1..453: note = XENP45812 Chain 1- STEAP-A[STEAP1]_H1_IgG1_PVA_/S267K

SEQ ID NO: 1167 - protein, 220 aa, synthetic construct
  source 1..220: note = XENP45812 Chain 2- STEAP-A[STEAP1]_L1.33_Light Chain
DIVMTQSPDSLAVSLGERATINCKSSQSLLYRSIQKNYLAWYQQKPGQSPKLLIYWASTRESGVPDRFTGSGSGTDFTLTISSLQAEDVAVYYCQQYYNYPRTFGGGTKVEIKRTVAAPSVFIFPPSDEQLKSGTASVVCLLNNFYPREAKVQWKVDNALQSGNSQESVTEQDSKDSTYSLSSTLTLSKADYEKHKVYACEVTHQGLSSPVTKSFNRGEC

SEQ ID NO: 1168 - protein, 453 aa, synthetic construct; identical to SEQ ID NO: 716
  source 1..453: note = XENP45813 Chain 1- STEAP-A[STEAP1]_H1_IgG1_PVA_/S267K

SEQ ID NO: 1169 - protein, 220 aa, synthetic construct
  source 1..220: note = XENP45813 Chain 2- STEAP-A[STEAP1]_L1.34_Light Chain
DIVMTQSPDSLAVSLGERATINCKSSQSLLYRSKQKNYLAWYQQKPGQSPKLLIYWASTRESGVPDRFTGSGSGTDFTLTISSLQAEDVAVYYCQQYYNYPRTFGGGTKVEIKRTVAAPSVFIFPPSDEQLKSGTASVVCLLNNFYPREAKVQWKVDNALQSGNSQESVTEQDSKDSTYSLSSTLTLSKADYEKHKVYACEVTHQGLSSPVTKSFNRGEC

SEQ ID NO: 1170 - protein, 453 aa, synthetic construct; identical to SEQ ID NO: 716
  source 1..453: note = XENP45814 Chain 1- STEAP-A[STEAP1]_H1_IgG1_PVA_/S267K

SEQ ID NO: 1171 - protein, 220 aa, synthetic construct
  source 1..220: note = XENP45814 Chain 2- STEAP-A[STEAP1]_L1.35_Light Chain
DIVMTQSPDSLAVSLGERATINCKSSQSLLYRSLQKNYLAWYQQKPGQSPKLLIYWASTRESGVPDRFTGSGSGTDFTLTISSLQAEDVAVYYCQQYYNYPRTFGGGTKVEIKRTVAAPSVFIFPPSDEQLKSGTASVVCLLNNFYPREAKVQWKVDNALQSGNSQESVTEQDSKDSTYSLSSTLTLSKADYEKHKVYACEVTHQGLSSPVTKSFNRGEC

SEQ ID NO: 1172 - protein, 453 aa, synthetic construct; identical to SEQ ID NO: 716
  source 1..453: note = XENP45815 Chain 1- STEAP-A[STEAP1]_H1_IgG1_PVA_/S267K

SEQ ID NO: 1173 - protein, 220 aa, synthetic construct
  source 1..220: note = XENP45815 Chain 2- STEAP-A[STEAP1]_L1.36_Light Chain
DIVMTQSPDSLAVSLGERATINCKSSQSLLYRSQQKNYLAWYQQKPGQSPKLLIYWASTRESGVPDRFTGSGSGTDFTLTISSLQAEDVAVYYCQQYYNYPRTFGGGTKVEIKRTVAAPSVFIFPPSDEQLKSGTASVVCLLNNFYPREAKVQWKVDNALQSGNSQESVTEQDSKDSTYSLSSTLTLSKADYEKHKVYACEVTHQGLSSPVTKSFNRGEC

SEQ ID NO: 1174 - protein, 453 aa, synthetic construct; identical to SEQ ID NO: 716
  source 1..453: note = XENP45816 Chain 1- STEAP-A[STEAP1]_H1_IgG1_PVA_/S267K

SEQ ID NO: 1175 - protein, 220 aa, synthetic construct
  source 1..220: note = XENP45816 Chain 2- STEAP-A[STEAP1]_L1.37_Light Chain
DIVMTQSPDSLAVSLGERATINCKSSQSLLYRSRQKNYLAWYQQKPGQSPKLLIYWASTRESGVPDRFTGSGSGTDFTLTISSLQAEDVAVYYCQQYYNYPRTFGGGTKVEIKRTVAAPSVFIFPPSDEQLKSGTASVVCLLNNFYPREAKVQWKVDNALQSGNSQESVTEQDSKDSTYSLSSTLTLSKADYEKHKVYACEVTHQGLSSPVTKSFNRGEC

SEQ ID NO: 1176 - protein, 453 aa, synthetic construct; identical to SEQ ID NO: 716
  source 1..453: note = XENP45817 Chain 1- STEAP-A[STEAP1]_H1_IgG1_PVA_/S267K

SEQ ID NO: 1177 - protein, 220 aa, synthetic construct
  source 1..220: note = XENP45817 Chain 2- STEAP-A[STEAP1]_L1.38_Light Chain
DIVMTQSPDSLAVSLGERATINCKSSQSLLYRSSQKNYLAWYQQKPGQSPKLLIYWASTRESGVPDRFTGSGSGTDFTLTISSLQAEDVAVYYCQQYYNYPRTFGGGTKVEIKRTVAAPSVFIFPPSDEQLKSGTASVVCLLNNFYPREAKVQWKVDNALQSGNSQESVTEQDSKDSTYSLSSTLTLSKADYEKHKVYACEVTHQGLSSPVTKSFNRGEC

SEQ ID NO: 1178 - protein, 453 aa, synthetic construct; identical to SEQ ID NO: 716
  source 1..453: note = XENP45818 Chain 1- STEAP-A[STEAP1]_H1_IgG1_PVA_/S267K

SEQ ID NO: 1179 - protein, 220 aa, synthetic construct
  source 1..220: note = XENP45818 Chain 2- STEAP-A[STEAP1]_L1.39_Light Chain
DIVMTQSPDSLAVSLGERATINCKSSQSLLYRSTQKNYLAWYQQKPGQSPKLLIYWASTRESGVPDRFTGSGSGTDFTLTISSLQAEDVAVYYCQQYYNYPRTFGGGTKVEIKRTVAAPSVFIFPPSDEQLKSGTASVVCLLNNFYPREAKVQWKVDNALQSGNSQESVTEQDSKDSTYSLSSTLTLSKADYEKHKVYACEVTHQGLSSPVTKSFNRGEC

SEQ ID NO: 1180 - protein, 453 aa, synthetic construct; identical to SEQ ID NO: 716
  source 1..453: note = XENP45819 Chain 1- STEAP-A[STEAP1]_H1_IgG1_PVA_/S267K

SEQ ID NO: 1181 - protein, 220 aa, synthetic construct
  source 1..220: note = XENP45819 Chain 2- STEAP-A[STEAP1]_L1.40_Light Chain
DIVMTQSPDSLAVSLGERATINCKSSQSLLYRSYQKNYLAWYQQKPGQSPKLLIYWASTRESGVPDRFTGSGSGTDFTLTISSLQAEDVAVYYCQQYYNYPRTFGGGTKVEIKRTVAAPSVFIFPPSDEQLKSGTASVVCLLNNFYPREAKVQWKVDNALQSGNSQESVTEQDSKDSTYSLSSTLTLSKADYEKHKVYACEVTHQGLSSPVTKSFNRGEC

SEQ ID NO: 1182 - protein, 453 aa, synthetic construct; identical to SEQ ID NO: 716
  source 1..453: note = XENP45820 Chain 1- STEAP-A[STEAP1]_H1_IgG1_PVA_/S267K

SEQ ID NO: 1183 - protein, 220 aa, synthetic construct
  source 1..220: note = XENP45820 Chain 2- STEAP-A[STEAP1]_L1.41_Light Chain
DIVMTQSPDSLAVSLGERATINCKSSQSLLYRSNEKNYLAWYQQKPGQSPKLLIYWASTRESGVPDRFTGSGSGTDFTLTISSLQAEDVAVYYCQQYYNYPRTFGGGTKVEIKRTVAAPSVFIFPPSDEQLKSGTASVVCLLNNFYPREAKVQWKVDNALQSGNSQESVTEQDSKDSTYSLSSTLTLSKADYEKHKVYACEVTHQGLSSPVTKSFNRGEC

SEQ ID NO: 1184 - protein, 453 aa, synthetic construct; identical to SEQ ID NO: 716
  source 1..453: note = XENP45821 Chain 1- STEAP-A[STEAP1]_H1_IgG1_PVA_/S267K

SEQ ID NO: 1185 - protein, 220 aa, synthetic construct
  source 1..220: note = XENP45821 Chain 2- STEAP-A[STEAP1]_L1.42_Light Chain
DIVMTQSPDSLAVSLGERATINCKSSQSLLYRSNHKNYLAWYQQKPGQSPKLLIYWASTRESGVPDRFTGSGSGTDFTLTISSLQAEDVAVYYCQQYYNYPRTFGGGTKVEIKRTVAAPSVFIFPPSDEQLKSGTASVVCLLNNFYPREAKVQWKVDNALQSGNSQESVTEQDSKDSTYSLSSTLTLSKADYEKHKVYACEVTHQGLSSPVTKSFNRGEC

SEQ ID NO: 1186 - protein, 453 aa, synthetic construct; identical to SEQ ID NO: 716
  source 1..453: note = XENP45822 Chain 1- STEAP-A[STEAP1]_H1_IgG1_PVA_/S267K

SEQ ID NO: 1187 - protein, 220 aa, synthetic construct
  source 1..220: note = XENP45822 Chain 2- STEAP-A[STEAP1]_L1.43_Light Chain
DIVMTQSPDSLAVSLGERATINCKSSQSLLYRSNKKNYLAWYQQKPGQSPKLLIYWASTRESGVPDRFTGSGSGTDFTLTISSLQAEDVAVYYCQQYYNYPRTFGGGTKVEIKRTVAAPSVFIFPPSDEQLKSGTASVVCLLNNFYPREAKVQWKVDNALQSGNSQESVTEQDSKDSTYSLSSTLTLSKADYEKHKVYACEVTHQGLSSPVTKSFNRGEC

SEQ ID NO: 1188 - protein, 453 aa, synthetic construct; identical to SEQ ID NO: 716
  source 1..453: note = XENP45823 Chain 1- STEAP-A[STEAP1]_H1_IgG1_PVA_/S267K

SEQ ID NO: 1189 - protein, 220 aa, synthetic construct
  source 1..220: note = XENP45823 Chain 2- STEAP-A[STEAP1]_L1.44_Light Chain
DIVMTQSPDSLAVSLGERATINCKSSQSLLYRSNNKNYLAWYQQKPGQSPKLLIYWASTRESGVPDRFTGSGSGTDFTLTISSLQAEDVAVYYCQQYYNYPRTFGGGTKVEIKRTVAAPSVFIFPPSDEQLKSGTASVVCLLNNFYPREAKVQWKVDNALQSGNSQESVTEQDSKDSTYSLSSTLTLSKADYEKHKVYACEVTHQGLSSPVTKSFNRGEC

SEQ ID NO: 1190 - protein, 453 aa, synthetic construct; identical to SEQ ID NO: 716
  source 1..453: note = XENP45824 Chain 1- STEAP-A[STEAP1]_H1_IgG1_PVA_/S267K

SEQ ID NO: 1191 - protein, 220 aa, synthetic construct
  source 1..220: note = XENP45824 Chain 2- STEAP-A[STEAP1]_L1.45_Light Chain
DIVMTQSPDSLAVSLGERATINCKSSQSLLYRSNYKNYLAWYQQKPGQSPKLLIYWASTRESGVPDRFTGSGSGTDFTLTISSLQAEDVAVYYCQQYYNYPRTFGGGTKVEIKRTVAAPSVFIFPPSDEQLKSGTASVVCLLNNFYPREAKVQWKVDNALQSGNSQESVTEQDSKDSTYSLSSTLTLSKADYEKHKVYACEVTHQGLSSPVTKSFNRGEC

SEQ ID NO: 1192 - protein, 453 aa, synthetic construct; identical to SEQ ID NO: 716
  source 1..453: note = XENP45825 Chain 1- STEAP-A[STEAP1]_H1_IgG1_PVA_/S267K

SEQ ID NO: 1193 - protein, 220 aa, synthetic construct
  source 1..220: note = XENP45825 Chain 2- STEAP-A[STEAP1]_L1.46_Light Chain
DIVMTQSPDSLAVSLGERATINCKSSQSLLYRSNQQNYLAWYQQKPGQSPKLLIYWASTRESGVPDRFTGSGSGTDFTLTISSLQAEDVAVYYCQQYYNYPRTFGGGTKVEIKRTVAAPSVFIFPPSDEQLKSGTASVVCLLNNFYPREAKVQWKVDNALQSGNSQESVTEQDSKDSTYSLSSTLTLSKADYEKHKVYACEVTHQGLSSPVTKSFNRGEC

SEQ ID NO: 1194 - protein, 453 aa, synthetic construct; identical to SEQ ID NO: 716
  source 1..453: note = XENP45826 Chain 1- STEAP-A[STEAP1]_H1_IgG1_PVA_/S267K

SEQ ID NO: 1195 - protein, 220 aa, synthetic construct; identical to SEQ ID NO: 487
  source 1..220: note = XENP45826 Chain 2- STEAP-A[STEAP1]_L1.47_Light Chain

SEQ ID NO: 1196 - protein, 453 aa, synthetic construct; identical to SEQ ID NO: 716
  source 1..453: note = XENP45827 Chain 1- STEAP-A[STEAP1]_H1_IgG1_PVA_/S267K

SEQ ID NO: 1197 - protein, 220 aa, synthetic construct
  source 1..220: note = XENP45827 Chain 2- STEAP-A[STEAP1]_L1.48_Light Chain
DIVMTQSPDSLAVSLGERATINCKSSQSLLYRSNQSNYLAWYQQKPGQSPKLLIYWASTRESGVPDRFTGSGSGTDFTLTISSLQAEDVAVYYCQQYYNYPRTFGGGTKVEIKRTVAAPSVFIFPPSDEQLKSGTASVVCLLNNFYPREAKVQWKVDNALQSGNSQESVTEQDSKDSTYSLSSTLTLSKADYEKHKVYACEVTHQGLSSPVTKSFNRGEC

SEQ ID NO: 1198 - protein, 453 aa, synthetic construct; identical to SEQ ID NO: 716
  source 1..453: note = XENP45828 Chain 1- STEAP-A[STEAP1]_H1_IgG1_PVA_/S267K

SEQ ID NO: 1199 - protein, 220 aa, synthetic construct
  source 1..220: note = XENP45828 Chain 2- STEAP-A[STEAP1]_L1.49_Light Chain
DIVMTQSPDSLAVSLGERATINCKSSQSLLYRSNQKKYLAWYQQKPGQSPKLLIYWASTRESGVPDRFTGSGSGTDFTLTISSLQAEDVAVYYCQQYYNYPRTFGGGTKVEIKRTVAAPSVFIFPPSDEQLKSGTASVVCLLNNFYPREAKVQWKVDNALQSGNSQESVTEQDSKDSTYSLSSTLTLSKADYEKHKVYACEVTHQGLSSPVTKSFNRGEC

SEQ ID NO: 1200 - protein, 453 aa, synthetic construct; identical to SEQ ID NO: 716
  source 1..453: note = XENP45829 Chain 1- STEAP-A[STEAP1]_H1_IgG1_PVA_/S267K

SEQ ID NO: 1201 - protein, 220 aa, synthetic construct
  source 1..220: note = XENP45829 Chain 2- STEAP-A[STEAP1]_L1.50_Light Chain
DIVMTQSPDSLAVSLGERATINCKSSQSLLYRSNQKRYLAWYQQKPGQSPKLLIYWASTRESGVPDRFTGSGSGTDFTLTISSLQAEDVAVYYCQQYYNYPRTFGGGTKVEIKRTVAAPSVFIFPPSDEQLKSGTASVVCLLNNFYPREAKVQWKVDNALQSGNSQESVTEQDSKDSTYSLSSTLTLSKADYEKHKVYACEVTHQGLSSPVTKSFNRGEC

SEQ ID NO: 1202 - protein, 453 aa, synthetic construct; identical to SEQ ID NO: 716
  source 1..453: note = XENP45830 Chain 1- STEAP-A[STEAP1]_H1_IgG1_PVA_/S267K

SEQ ID NO: 1203 - protein, 220 aa, synthetic construct
  source 1..220: note = XENP45830 Chain 2- STEAP-A[STEAP1]_L1.51_Light Chain
DIVMTQSPDSLAVSLGERATINCKSSQSLLYRSNQKYYLAWYQQKPGQSPKLLIYWASTRESGVPDRFTGSGSGTDFTLTISSLQAEDVAVYYCQQYYNYPRTFGGGTKVEIKRTVAAPSVFIFPPSDEQLKSGTASVVCLLNNFYPREAKVQWKVDNALQSGNSQESVTEQDSKDSTYSLSSTLTLSKADYEKHKVYACEVTHQGLSSPVTKSFNRGEC

SEQ ID NO: 1204 - protein, 453 aa, synthetic construct; identical to SEQ ID NO: 716
  source 1..453: note = XENP45831 Chain 1- STEAP-A[STEAP1]_H1_IgG1_PVA_/S267K

SEQ ID NO: 1205 - protein, 220 aa, synthetic construct
  source 1..220: note = XENP45831 Chain 2- STEAP-A[STEAP1]_L1.52_Light Chain
DIVMTQSPDSLAVSLGERATINCKSSQSLLYRSNQKNYLAWYQQKPGQSPKLLIYWAETRESGVPDRFTGSGSGTDFTLTISSLQAEDVAVYYCQQYYNYPRTFGGGTKVEIKRTVAAPSVFIFPPSDEQLKSGTASVVCLLNNFYPREAKVQWKVDNALQSGNSQESVTEQDSKDSTYSLSSTLTLSKADYEKHKVYACEVTHQGLSSPVTKSFNRGEC

SEQ ID NO: 1206 - protein, 453 aa, synthetic construct; identical to SEQ ID NO: 716
  source 1..453: note = XENP45832 Chain 1- STEAP-A[STEAP1]_H1_IgG1_PVA_/S267K

SEQ ID NO: 1207 - protein, 220 aa, synthetic construct
  source 1..220: note = XENP45832 Chain 2- STEAP-A[STEAP1]_L1.53_Light Chain
DIVMTQSPDSLAVSLGERATINCKSSQSLLYRSNQKNYLAWYQQKPGQSPKLLIYWAKTRESGVPDRFTGSGSGTDFTLTISSLQAEDVAVYYCQQYYNYPRTFGGGTKVEIKRTVAAPSVFIFPPSDEQLKSGTASVVCLLNNFYPREAKVQWKVDNALQSGNSQESVTEQDSKDSTYSLSSTLTLSKADYEKHKVYACEVTHQGLSSPVTKSFNRGEC

SEQ ID NO: 1208 - protein, 453 aa, synthetic construct; identical to SEQ ID NO: 716
  source 1..453: note = XENP45833 Chain 1- STEAP-A[STEAP1]_H1_IgG1_PVA_/S267K

SEQ ID NO: 1209 - protein, 220 aa, synthetic construct
  source 1..220: note = XENP45833 Chain 2- STEAP-A[STEAP1]_L1.54_Light Chain
DIVMTQSPDSLAVSLGERATINCKSSQSLLYRSNQKNYLAWYQQKPGQSPKLLIYWALTRESGVPDRFTGSGSGTDFTLTISSLQAEDVAVYYCQQYYNYPRTFGGGTKVEIKRTVAAPSVFIFPPSDEQLKSGTASVVCLLNNFYPREAKVQWKVDNALQSGNSQESVTEQDSKDSTYSLSSTLTLSKADYEKHKVYACEVTHQGLSSPVTKSFNRGEC

SEQ ID NO: 1210 - protein, 453 aa, synthetic construct; identical to SEQ ID NO: 716
  source 1..453: note = XENP45834 Chain 1- STEAP-A[STEAP1]_H1_IgG1_PVA_/S267K

SEQ ID NO: 1211 - protein, 220 aa, synthetic construct
  source 1..220: note = XENP45834 Chain 2- STEAP-A[STEAP1]_L1.55_Light Chain
DIVMTQSPDSLAVSLGERATINCKSSQSLLYRSNQKNYLAWYQQKPGQSPKLLIYWAQTRESGVPDRFTGSGSGTDFTLTISSLQAEDVAVYYCQQYYNYPRTFGGGTKVEIKRTVAAPSVFIFPPSDEQLKSGTASVVCLLNNFYPREAKVQWKVDNALQSGNSQESVTEQDSKDSTYSLSSTLTLSKADYEKHKVYACEVTHQGLSSPVTKSFNRGEC

SEQ ID NO: 1212 - protein, 453 aa, synthetic construct; identical to SEQ ID NO: 716
  source 1..453: note = XENP45835 Chain 1- STEAP-A[STEAP1]_H1_IgG1_PVA_/S267K

SEQ ID NO: 1213 - protein, 220 aa, synthetic construct; identical to SEQ ID NO: 490
  source 1..220: note = XENP45835 Chain 2- STEAP-A[STEAP1]_L1.56_Light Chain

SEQ ID NO: 1214 - protein, 453 aa, synthetic construct; identical to SEQ ID NO: 716
  source 1..453: note = XENP45836 Chain 1- STEAP-A[STEAP1]_H1_IgG1_PVA_/S267K

SEQ ID NO: 1215 - protein, 220 aa, synthetic construct
  source 1..220: note = XENP45836 Chain 2- STEAP-A[STEAP1]_L1.57_Light Chain
DIVMTQSPDSLAVSLGERATINCKSSQSLLYRSNQKNYLAWYQQKPGQSPKLLIYWASERESGVPDRFTGSGSGTDFTLTISSLQAEDVAVYYCQQYYNYPRTFGGGTKVEIKRTVAAPSVFIFPPSDEQLKSGTASVVCLLNNFYPREAKVQWKVDNALQSGNSQESVTEQDSKDSTYSLSSTLTLSKADYEKHKVYACEVTHQGLSSPVTKSFNRGEC

SEQ ID NO: 1216 - protein, 453 aa, synthetic construct; identical to SEQ ID NO: 716
  source 1..453: note = XENP45837 Chain 1- STEAP-A[STEAP1]_H1_IgG1_PVA_/S267K

SEQ ID NO: 1217 - protein, 220 aa, synthetic construct
  source 1..220: note = XENP45837 Chain 2- STEAP-A[STEAP1]_L1.58_Light Chain
DIVMTQSPDSLAVSLGERATINCKSSQSLLYRSNQKNYLAWYQQKPGQSPKLLIYWASKRESGVPDRFTGSGSGTDFTLTISSLQAEDVAVYYCQQYYNYPRTFGGGTKVEIKRTVAAPSVFIFPPSDEQLKSGTASVVCLLNNFYPREAKVQWKVDNALQSGNSQESVTEQDSKDSTYSLSSTLTLSKADYEKHKVYACEVTHQGLSSPVTKSFNRGEC

SEQ ID NO: 1218 - protein, 453 aa, synthetic construct; identical to SEQ ID NO: 716
  source 1..453: note = XENP45838 Chain 1- STEAP-A[STEAP1]_H1_IgG1_PVA_/S267K

SEQ ID NO: 1219 - protein, 220 aa, synthetic construct
  source 1..220: note = XENP45838 Chain 2- STEAP-A[STEAP1]_L1.59_Light Chain
DIVMTQSPDSLAVSLGERATINCKSSQSLLYRSNQKNYLAWYQQKPGQSPKLLIYWASLRESGVPDRFTGSGSGTDFTLTISSLQAEDVAVYYCQQYYNYPRTFGGGTKVEIKRTVAAPSVFIFPPSDEQLKSGTASVVCLLNNFYPREAKVQWKVDNALQSGNSQESVTEQDSKDSTYSLSSTLTLSKADYEKHKVYACEVTHQGLSSPVTKSFNRGEC

SEQ ID NO: 1220 - protein, 453 aa, synthetic construct; identical to SEQ ID NO: 716
  source 1..453: note = XENP45839 Chain 1- STEAP-A[STEAP1]_H1_IgG1_PVA_/S267K

SEQ ID NO: 1221 - protein, 220 aa, synthetic construct
  source 1..220: note = XENP45839 Chain 2- STEAP-A[STEAP1]_L1.60_Light Chain
DIVMTQSPDSLAVSLGERATINCKSSQSLLYRSNQKNYLAWYQQKPGQSPKLLIYWASQRESGVPDRFTGSGSGTDFTLTISSLQAEDVAVYYCQQYYNYPRTFGGGTKVEIKRTVAAPSVFIFPPSDEQLKSGTASVVCLLNNFYPREAKVQWKVDNALQSGNSQESVTEQDSKDSTYSLSSTLTLSKADYEKHKVYACEVTHQGLSSPVTKSFNRGEC

SEQ ID NO: 1222 - protein, 453 aa, synthetic construct; identical to SEQ ID NO: 716
  source 1..453: note = XENP45840 Chain 1- STEAP-A[STEAP1]_H1_IgG1_PVA_/S267K

SEQ ID NO: 1223 - protein, 220 aa, synthetic construct
  source 1..220: note = XENP45840 Chain 2- STEAP-A[STEAP1]_L1.61_Light Chain
DIVMTQSPDSLAVSLGERATINCKSSQSLLYRSNQKNYLAWYQQKPGQSPKLLIYWASYRESGVPDRFTGSGSGTDFTLTISSLQAEDVAVYYCQQYYNYPRTFGGGTKVEIKRTVAAPSVFIFPPSDEQLKSGTASVVCLLNNFYPREAKVQWKVDNALQSGNSQESVTEQDSKDSTYSLSSTLTLSKADYEKHKVYACEVTHQGLSSPVTKSFNRGEC

SEQ ID NO: 1224 - protein, 453 aa, synthetic construct; identical to SEQ ID NO: 716
  source 1..453: note = XENP45841 Chain 1- STEAP-A[STEAP1]_H1_IgG1_PVA_/S267K

SEQ ID NO: 1225 - protein, 220 aa, synthetic construct
  source 1..220: note = XENP45841 Chain 2- STEAP-A[STEAP1]_L1.62_Light Chain
DIVMTQSPDSLAVSLGERATINCKSSQSLLYRSNQKNYLAWYQQKPGQSPKLLIYWASTRESGVPDRFTGSGSGTDFTLTISSLQAEDVAVYYCQQYANYPRTFGGGTKVEIKRTVAAPSVFIFPPSDEQLKSGTASVVCLLNNFYPREAKVQWKVDNALQSGNSQESVTEQDSKDSTYSLSSTLTLSKADYEKHKVYACEVTHQGLSSPVTKSFNRGEC

SEQ ID NO: 1226 - protein, 453 aa, synthetic construct; identical to SEQ ID NO: 716
  source 1..453: note = XENP45842 Chain 1- STEAP-A[STEAP1]_H1_IgG1_PVA_/S267K

SEQ ID NO: 1227 - protein, 220 aa, synthetic construct
  source 1..220: note = XENP45842 Chain 2- STEAP-A[STEAP1]_L1.63_Light Chain
DIVMTQSPDSLAVSLGERATINCKSSQSLLYRSNQKNYLAWYQQKPGQSPKLLIYWASTRESGVPDRFTGSGSGTDFTLTISSLQAEDVAVYYCQQYDNYPRTFGGGTKVEIKRTVAAPSVFIFPPSDEQLKSGTASVVCLLNNFYPREAKVQWKVDNALQSGNSQESVTEQDSKDSTYSLSSTLTLSKADYEKHKVYACEVTHQGLSSPVTKSFNRGEC

SEQ ID NO: 1228 - protein, 453 aa, synthetic construct; identical to SEQ ID NO: 716
  source 1..453: note = XENP45843 Chain 1- STEAP-A[STEAP1]_H1_IgG1_PVA_/S267K

SEQ ID NO: 1229 - protein, 220 aa, synthetic construct
  source 1..220: note = XENP45843 Chain 2- STEAP-A[STEAP1]_L1.64_Light Chain
DIVMTQSPDSLAVSLGERATINCKSSQSLLYRSNQKNYLAWYQQKPGQSPKLLIYWASTRESGVPDRFTGSGSGTDFTLTISSLQAEDVAVYYCQQYHNYPRTFGGGTKVEIKRTVAAPSVFIFPPSDEQLKSGTASVVCLLNNFYPREAKVQWKVDNALQSGNSQESVTEQDSKDSTYSLSSTLTLSKADYEKHKVYACEVTHQGLSSPVTKSFNRGEC

SEQ ID NO: 1230 - protein, 453 aa, synthetic construct; identical to SEQ ID NO: 716
  source 1..453: note = XENP45844 Chain 1- STEAP-A[STEAP1]_H1_IgG1_PVA_/S267K

SEQ ID NO: 1231 - protein, 220 aa, synthetic construct
  source 1..220: note = XENP45844 Chain 2- STEAP-A[STEAP1]_L1.65_Light Chain
DIVMTQSPDSLAVSLGERATINCKSSQSLLYRSNQKNYLAWYQQKPGQSPKLLIYWASTRESGVPDRFTGSGSGTDFTLTISSLQAEDVAVYYCQQYKNYPRTFGGGTKVEIKRTVAAPSVFIFPPSDEQLKSGTASVVCLLNNFYPREAKVQWKVDNALQSGNSQESVTEQDSKDSTYSLSSTLTLSKADYEKHKVYACEVTHQGLSSPVTKSFNRGEC

SEQ ID NO: 1232 - protein, 453 aa, synthetic construct; identical to SEQ ID NO: 716
  source 1..453: note = XENP45845 Chain 1- STEAP-A[STEAP1]_H1_IgG1_PVA_/S267K

SEQ ID NO: 1233 - protein, 220 aa, synthetic construct
  source 1..220: note = XENP45845 Chain 2- STEAP-A[STEAP1]_L1.66_Light Chain
DIVMTQSPDSLAVSLGERATINCKSSQSLLYRSNQKNYLAWYQQKPGQSPKLLIYWASTRESGVPDRFTGSGSGTDFTLTISSLQAEDVAVYYCQQYLNYPRTFGGGTKVEIKRTVAAPSVFIFPPSDEQLKSGTASVVCLLNNFYPREAKVQWKVDNALQSGNSQESVTEQDSKDSTYSLSSTLTLSKADYEKHKVYACEVTHQGLSSPVTKSFNRGEC

SEQ ID NO: 1234 - protein, 453 aa, synthetic construct; identical to SEQ ID NO: 716
  source 1..453: note = XENP45846 Chain 1- STEAP-A[STEAP1]_H1_IgG1_PVA_/S267K

SEQ ID NO: 1235 - protein, 220 aa, synthetic construct
  source 1..220: note = XENP45846 Chain 2- STEAP-A[STEAP1]_L1.67_Light Chain
DIVMTQSPDSLAVSLGERATINCKSSQSLLYRSNQKNYLAWYQQKPGQSPKLLIYWASTRESGVPDRFTGSGSGTDFTLTISSLQAEDVAVYYCQQYQNYPRTFGGGTKVEIKRTVAAPSVFIFPPSDEQLKSGTASVVCLLNNFYPREAKVQWKVDNALQSGNSQESVTEQDSKDSTYSLSSTLTLSKADYEKHKVYACEVTHQGLSSPVTKSFNRGEC

SEQ ID NO: 1236 - protein, 453 aa, synthetic construct; identical to SEQ ID NO: 716
  source 1..453: note = XENP45847 Chain 1- STEAP-A[STEAP1]_H1_IgG1_PVA_/S267K

SEQ ID NO: 1237 - protein, 220 aa, synthetic construct
  source 1..220: note = XENP45847 Chain 2- STEAP-A[STEAP1]_L1.68_Light Chain
DIVMTQSPDSLAVSLGERATINCKSSQSLLYRSNQKNYLAWYQQKPGQSPKLLIYWASTRESGVPDRFTGSGSGTDFTLTISSLQAEDVAVYYCQQYRNYPRTFGGGTKVEIKRTVAAPSVFIFPPSDEQLKSGTASVVCLLNNFYPREAKVQWKVDNALQSGNSQESVTEQDSKDSTYSLSSTLTLSKADYEKHKVYACEVTHQGLSSPVTKSFNRGEC

SEQ ID NO: 1238 - protein, 453 aa, synthetic construct; identical to SEQ ID NO: 716
  source 1..453: note = XENP45848 Chain 1- STEAP-A[STEAP1]_H1_IgG1_PVA_/S267K

SEQ ID NO: 1239 - protein, 220 aa, synthetic construct
  source 1..220: note = XENP45848 Chain 2- STEAP-A[STEAP1]_L1.69_Light Chain
DIVMTQSPDSLAVSLGERATINCKSSQSLLYRSNQKNYLAWYQQKPGQSPKLLIYWASTRESGVPDRFTGSGSGTDFTLTISSLQAEDVAVYYCQQYVNYPRTFGGGTKVEIKRTVAAPSVFIFPPSDEQLKSGTASVVCLLNNFYPREAKVQWKVDNALQSGNSQESVTEQDSKDSTYSLSSTLTLSKADYEKHKVYACEVTHQGLSSPVTKSFNRGEC

SEQ ID NO: 1240 - protein, 453 aa, synthetic construct; identical to SEQ ID NO: 716
  source 1..453: note = XENP45849 Chain 1- STEAP-A[STEAP1]_H1_IgG1_PVA_/S267K

SEQ ID NO: 1241 - protein, 220 aa, synthetic construct
  source 1..220: note = XENP45849 Chain 2- STEAP-A[STEAP1]_L1.70_Light Chain
DIVMTQSPDSLAVSLGERATINCKSSQSLLYRSNQKNYLAWYQQKPGQSPKLLIYWASTRESGVPDRFTGSGSGTDFTLTISSLQAEDVAVYYCQQYYDYPRTFGGGTKVEIKRTVAAPSVFIFPPSDEQLKSGTASVVCLLNNFYPREAKVQWKVDNALQSGNSQESVTEQDSKDSTYSLSSTLTLSKADYEKHKVYACEVTHQGLSSPVTKSFNRGEC

SEQ ID NO: 1242 - protein, 453 aa, synthetic construct; identical to SEQ ID NO: 716
  source 1..453: note = XENP45850 Chain 1- STEAP-A[STEAP1]_H1_IgG1_PVA_/S267K

SEQ ID NO: 1243 - protein, 220 aa, synthetic construct
  source 1..220: note = XENP45850 Chain 2- STEAP-A[STEAP1]_L1.71_Light Chain
DIVMTQSPDSLAVSLGERATINCKSSQSLLYRSNQKNYLAWYQQKPGQSPKLLIYWASTRESGVPDRFTGSGSGTDFTLTISSLQAEDVAVYYCQQYYHYPRTFGGGTKVEIKRTVAAPSVFIFPPSDEQLKSGTASVVCLLNNFYPREAKVQWKVDNALQSGNSQESVTEQDSKDSTYSLSSTLTLSKADYEKHKVYACEVTHQGLSSPVTKSFNRGEC

SEQ ID NO: 1244 - protein, 453 aa, synthetic construct; identical to SEQ ID NO: 716
  source 1..453: note = XENP45851 Chain 1- STEAP-A[STEAP1]_H1_IgG1_PVA_/S267K

SEQ ID NO: 1245 - protein, 220 aa, synthetic construct
  source 1..220: note = XENP45851 Chain 2- STEAP-A[STEAP1]_L1.72_Light Chain
DIVMTQSPDSLAVSLGERATINCKSSQSLLYRSNQKNYLAWYQQKPGQSPKLLIYWASTRESGVPDRFTGSGSGTDFTLTISSLQAEDVAVYYCQQYYKYPRTFGGGTKVEIKRTVAAPSVFIFPPSDEQLKSGTASVVCLLNNFYPREAKVQWKVDNALQSGNSQESVTEQDSKDSTYSLSSTLTLSKADYEKHKVYACEVTHQGLSSPVTKSFNRGEC

SEQ ID NO: 1246 - protein, 453 aa, synthetic construct; identical to SEQ ID NO: 716
  source 1..453: note = XENP45852 Chain 1- STEAP-A[STEAP1]_H1_IgG1_PVA_/S267K

SEQ ID NO: 1247 - protein, 220 aa, synthetic construct
  source 1..220: note = XENP45852 Chain 2- STEAP-A[STEAP1]_L1.73_Light Chain
DIVMTQSPDSLAVSLGERATINCKSSQSLLYRSNQKNYLAWYQQKPGQSPKLLIYWASTRESGVPDRFTGSGSGTDFTLTISSLQAEDVAVYYCQQYYLYPRTFGGGTKVEIKRTVAAPSVFIFPPSDEQLKSGTASVVCLLNNFYPREAKVQWKVDNALQSGNSQESVTEQDSKDSTYSLSSTLTLSKADYEKHKVYACEVTHQGLSSPVTKSFNRGEC

SEQ ID NO: 1248 - protein, 453 aa, synthetic construct; identical to SEQ ID NO: 716
  source 1..453: note = XENP45853 Chain 1- STEAP-A[STEAP1]_H1_IgG1_PVA_/S267K

SEQ ID NO: 1249 - protein, 220 aa, synthetic construct
  source 1..220: note = XENP45853 Chain 2- STEAP-A[STEAP1]_L1.74_Light Chain
DIVMTQSPDSLAVSLGERATINCKSSQSLLYRSNQKNYLAWYQQKPGQSPKLLIYWASTRESGVPDRFTGSGSGTDFTLTISSLQAEDVAVYYCQQYYQYPRTFGGGTKVEIKRTVAAPSVFIFPPSDEQLKSGTASVVCLLNNFYPREAKVQWKVDNALQSGNSQESVTEQDSKDSTYSLSSTLTLSKADYEKHKVYACEVTHQGLSSPVTKSFNRGEC

SEQ ID NO: 1250 - protein, 453 aa, synthetic construct; identical to SEQ ID NO: 716
  source 1..453: note = XENP45854 Chain 1- STEAP-A[STEAP1]_H1_IgG1_PVA_/S267K

SEQ ID NO: 1251 - protein, 220 aa, synthetic construct
  source 1..220: note = XENP45854 Chain 2- STEAP-A[STEAP1]_L1.75_Light Chain
DIVMTQSPDSLAVSLGERATINCKSSQSLLYRSNQKNYLAWYQQKPGQSPKLLIYWASTRESGVPDRFTGSGSGTDFTLTISSLQAEDVAVYYCQQYYRYPRTFGGGTKVEIKRTVAAPSVFIFPPSDEQLKSGTASVVCLLNNFYPREAKVQWKVDNALQSGNSQESVTEQDSKDSTYSLSSTLTLSKADYEKHKVYACEVTHQGLSSPVTKSFNRGEC

SEQ ID NO: 1252 - protein, 453 aa, synthetic construct; identical to SEQ ID NO: 716
  source 1..453: note = XENP45855 Chain 1- STEAP-A[STEAP1]_H1_IgG1_PVA_/S267K

SEQ ID NO: 1253 - protein, 220 aa, synthetic construct
  source 1..220: note = XENP45855 Chain 2- STEAP-A[STEAP1]_L1.76_Light Chain
DIVMTQSPDSLAVSLGERATINCKSSQSLLYRSNQKNYLAWYQQKPGQSPKLLIYWASTRESGVPDRFTGSGSGTDFTLTISSLQAEDVAVYYCQQYYSYPRTFGGGTKVEIKRTVAAPSVFIFPPSDEQLKSGTASVVCLLNNFYPREAKVQWKVDNALQSGNSQESVTEQDSKDSTYSLSSTLTLSKADYEKHKVYACEVTHQGLSSPVTKSFNRGEC

SEQ ID NO: 1254 - protein, 453 aa, synthetic construct; identical to SEQ ID NO: 716
  source 1..453: note = XENP45856 Chain 1- STEAP-A[STEAP1]_H1_IgG1_PVA_/S267K

SEQ ID NO: 1255 - protein, 220 aa, synthetic construct
  source 1..220: note = XENP45856 Chain 2- STEAP-A[STEAP1]_L1.77_Light Chain
DIVMTQSPDSLAVSLGERATINCKSSQSLLYRSNQKNYLAWYQQKPGQSPKLLIYWASTRESGVPDRFTGSGSGTDFTLTISSLQAEDVAVYYCQQYYTYPRTFGGGTKVEIKRTVAAPSVFIFPPSDEQLKSGTASVVCLLNNFYPREAKVQWKVDNALQSGNSQESVTEQDSKDSTYSLSSTLTLSKADYEKHKVYACEVTHQGLSSPVTKSFNRGEC

SEQ ID NO: 1256 - protein, 453 aa, synthetic construct; identical to SEQ ID NO: 716
  source 1..453: note = XENP45857 Chain 1- STEAP-A[STEAP1]_H1_IgG1_PVA_/S267K

SEQ ID NO: 1257 - protein, 220 aa, synthetic construct
  source 1..220: note = XENP45857 Chain 2- STEAP-A[STEAP1]_L1.78_Light Chain
DIVMTQSPDSLAVSLGERATINCKSSQSLLYRSNQKNYLAWYQQKPGQSPKLLIYWASTRESGVPDRFTGSGSGTDFTLTISSLQAEDVAVYYCQQYYNAPRTFGGGTKVEIKRTVAAPSVFIFPPSDEQLKSGTASVVCLLNNFYPREAKVQWKVDNALQSGNSQESVTEQDSKDSTYSLSSTLTLSKADYEKHKVYACEVTHQGLSSPVTKSFNRGEC

SEQ ID NO: 1258 - protein, 453 aa, synthetic construct; identical to SEQ ID NO: 716
  source 1..453: note = XENP45858 Chain 1- STEAP-A[STEAP1]_H1_IgG1_PVA_/S267K

SEQ ID NO: 1259 - protein, 220 aa, synthetic construct
  source 1..220: note = XENP45858 Chain 2- STEAP-A[STEAP1]_L1.79_Light Chain
DIVMTQSPDSLAVSLGERATINCKSSQSLLYRSNQKNYLAWYQQKPGQSPKLLIYWASTRESGVPDRFTGSGSGTDFTLTISSLQAEDVAVYYCQQYYNDPRTFGGGTKVEIKRTVAAPSVFIFPPSDEQLKSGTASVVCLLNNFYPREAKVQWKVDNALQSGNSQESVTEQDSKDSTYSLSSTLTLSKADYEKHKVYACEVTHQGLSSPVTKSFNRGEC

SEQ ID NO: 1260 - protein, 453 aa, synthetic construct; identical to SEQ ID NO: 716
  source 1..453: note = XENP45859 Chain 1- STEAP-A[STEAP1]_H1_IgG1_PVA_/S267K

SEQ ID NO: 1261 - protein, 220 aa, synthetic construct
  source 1..220: note = XENP45859 Chain 2- STEAP-A[STEAP1]_L1.80_Light Chain
DIVMTQSPDSLAVSLGERATINCKSSQSLLYRSNQKNYLAWYQQKPGQSPKLLIYWASTRESGVPDRFTGSGSGTDFTLTISSLQAEDVAVYYCQQYYNHPRTFGGGTKVEIKRTVAAPSVFIFPPSDEQLKSGTASVVCLLNNFYPREAKVQWKVDNALQSGNSQESVTEQDSKDSTYSLSSTLTLSKADYEKHKVYACEVTHQGLSSPVTKSFNRGEC

SEQ ID NO: 1262 - protein, 453 aa, synthetic construct; identical to SEQ ID NO: 716
  source 1..453: note = XENP45860 Chain 1- STEAP-A[STEAP1]_H1_IgG1_PVA_/S267K

SEQ ID NO: 1263 - protein, 220 aa, synthetic construct
  source 1..220: note = XENP45860 Chain 2- STEAP-A[STEAP1]_L1.81_Light Chain
DIVMTQSPDSLAVSLGERATINCKSSQSLLYRSNQKNYLAWYQQKPGQSPKLLIYWASTRESGVPDRFTGSGSGTDFTLTISSLQAEDVAVYYCQQYYNKPRTFGGGTKVEIKRTVAAPSVFIFPPSDEQLKSGTASVVCLLNNFYPREAKVQWKVDNALQSGNSQESVTEQDSKDSTYSLSSTLTLSKADYEKHKVYACEVTHQGLSSPVTKSFNRGEC

SEQ ID NO: 1264 - protein, 453 aa, synthetic construct; identical to SEQ ID NO: 716
  source 1..453: note = XENP45861 Chain 1- STEAP-A[STEAP1]_H1_IgG1_PVA_/S267K

SEQ ID NO: 1265 - protein, 220 aa, synthetic construct
  source 1..220: note = XENP45861 Chain 2- STEAP-A[STEAP1]_L1.82_Light Chain
DIVMTQSPDSLAVSLGERATINCKSSQSLLYRSNQKNYLAWYQQKPGQSPKLLIYWASTRESGVPDRFTGSGSGTDFTLTISSLQAEDVAVYYCQQYYNLPRTFGGGTKVEIKRTVAAPSVFIFPPSDEQLKSGTASVVCLLNNFYPREAKVQWKVDNALQSGNSQESVTEQDSKDSTYSLSSTLTLSKADYEKHKVYACEVTHQGLSSPVTKSFNRGEC

SEQ ID NO: 1266 - protein, 453 aa, synthetic construct; identical to SEQ ID NO: 716
  source 1..453: note = XENP45862 Chain 1- STEAP-A[STEAP1]_H1_IgG1_PVA_/S267K

SEQ ID NO: 1267 - protein, 220 aa, synthetic construct
  source 1..220: note = XENP45862 Chain 2- STEAP-A[STEAP1]_L1.83_Light Chain
DIVMTQSPDSLAVSLGERATINCKSSQSLLYRSNQKNYLAWYQQKPGQSPKLLIYWASTRESGVPDRFTGSGSGTDFTLTISSLQAEDVAVYYCQQYYNQPRTFGGGTKVEIKRTVAAPSVFIFPPSDEQLKSGTASVVCLLNNFYPREAKVQWKVDNALQSGNSQESVTEQDSKDSTYSLSSTLTLSKADYEKHKVYACEVTHQGLSSPVTKSFNRGEC

SEQ ID NO: 1268 - protein, 453 aa, synthetic construct; identical to SEQ ID NO: 716
  source 1..453: note = XENP45863 Chain 1- STEAP-A[STEAP1]_H1_IgG1_PVA_/S267K

SEQ ID NO: 1269 - protein, 220 aa, synthetic construct
  source 1..220: note = XENP45863 Chain 2- STEAP-A[STEAP1]_L1.84_Light Chain
DIVMTQSPDSLAVSLGERATINCKSSQSLLYRSNQKNYLAWYQQKPGQSPKLLIYWASTRESGVPDRFTGSGSGTDFTLTISSLQAEDVAVYYCQQYYNRPRTFGGGTKVEIKRTVAAPSVFIFPPSDEQLKSGTASVVCLLNNFYPREAKVQWKVDNALQSGNSQESVTEQDSKDSTYSLSSTLTLSKADYEKHKVYACEVTHQGLSSPVTKSFNRGEC

SEQ ID NO: 1270 - protein, 453 aa, synthetic construct; identical to SEQ ID NO: 716
  source 1..453: note = XENP45864 Chain 1- STEAP-A[STEAP1]_H1_IgG1_PVA_/S267K

SEQ ID NO: 1271 - protein, 220 aa, synthetic construct
  source 1..220: note = XENP45864 Chain 2- STEAP-A[STEAP1]_L1.85_Light Chain
DIVMTQSPDSLAVSLGERATINCKSSQSLLYRSNQKNYLAWYQQKPGQSPKLLIYWASTRESGVPDRFTGSGSGTDFTLTISSLQAEDVAVYYCQQYYNVPRTFGGGTKVEIKRTVAAPSVFIFPPSDEQLKSGTASVVCLLNNFYPREAKVQWKVDNALQSGNSQESVTEQDSKDSTYSLSSTLTLSKADYEKHKVYACEVTHQGLSSPVTKSFNRGEC

SEQ ID NO: 1272 - protein, 453 aa, synthetic construct; identical to SEQ ID NO: 812
  source 1..453: note = XENP46211 Chain 1- STEAP-A[STEAP1]_H1.42_IgG1_PVA_/S267K

SEQ ID NO: 1273 - protein, 220 aa, synthetic construct; identical to SEQ ID NO: 487
  source 1..220: note = XENP46211 Chain 2- STEAP-A[STEAP1]_L1.47_Light Chain

SEQ ID NO: 1274 - protein, 453 aa, synthetic construct; identical to SEQ ID NO: 812
  source 1..453: note = XENP46212 Chain 1- STEAP-A[STEAP1]_H1.42_IgG1_PVA_/S267K

SEQ ID NO: 1275 - protein, 220 aa, synthetic construct; identical to SEQ ID NO: 490
  source 1..220: note = XENP46212 Chain 2- STEAP-A[STEAP1]_L1.56_Light Chain

SEQ ID NO: 1276 - protein, 453 aa, synthetic construct
  source 1..453: note = XENP46440 Chain 1- STEAP-A[STEAP1]_H1.190_IgG1_PVA_/S267K
QVQVQESGPGLVKPSQTLSLTCTVSGYSITSDYAWNWIRQPPGKKLEWIGYISNSGSTSYNPSLKSRVTISRDTSKNQFSLKLSSVTAADTAVYYCARERNYDYSAYYYAMDYWGQGTLVTVSSASTKGPSVFPLAPSSKSTSGGTAALGCLVKDYFPEPVTVSWNSGALTSGVHTFPAVLQSSGLYSLSSVVTVPSSSLGTQTYICNVNHKPSNTKVDKKVEPKSCDKTHTCPPCPAPPVAGPSVFLFPPKPKDTLMISRTPEVTCVVVDVKHEDPEVKFNWYVDGVEVHNAKTKPREEQYNSTYRVVSVLTVLHQDWLNGKEYKCKVSNKALPAPIEKTISKAKGQPREPQVYTLPPSREEMTKNQVSLTCLVKGFYPSDIAVEWESNGQPENNYKTTPPVLDSDGSFFLYSKLTVDKSRWQQGNVFSCSVMHEALHNHYTQKSLSLSPGK

SEQ ID NO: 1277 - protein, 220 aa, synthetic construct; identical to SEQ ID NO: 799
  source 1..220: note = XENP46440 Chain 2- STEAP-A[STEAP1]_L1.3_Light Chain

SEQ ID NO: 1278 - protein, 453 aa, synthetic construct
  source 1..453: note = XENP46441 Chain 1- STEAP-A[STEAP1]_H1.191_IgG1_PVA_/S267K
QVQVQESGPGLVKPSQTLSLTCTVSGYSITSDYAWNWIRQPPGKKLEWIGYISNSGSTSYNPSLKSRVTISRDTSKNQFSLKLSSVTAADTAVYYCARERNYDYSLYYYAMDYWGQGTLVTVSSASTKGPSVFPLAPSSKSTSGGTAALGCLVKDYFPEPVTVSWNSGALTSGVHTFPAVLQSSGLYSLSSVVTVPSSSLGTQTYICNVNHKPSNTKVDKKVEPKSCDKTHTCPPCPAPPVAGPSVFLFPPKPKDTLMISRTPEVTCVVVDVKHEDPEVKFNWYVDGVEVHNAKTKPREEQYNSTYRVVSVLTVLHQDWLNGKEYKCKVSNKALPAPIEKTISKAKGQPREPQVYTLPPSREEMTKNQVSLTCLVKGFYPSDIAVEWESNGQPENNYKTTPPVLDSDGSFFLYSKLTVDKSRWQQGNVFSCSVMHEALHNHYTQKSLSLSPGK

SEQ ID NO: 1279 - protein, 220 aa, synthetic construct; identical to SEQ ID NO: 799
  source 1..220: note = XENP46441 Chain 2- STEAP-A[STEAP1]_L1.3_Light Chain

SEQ ID NO: 1280 - protein, 453 aa, synthetic construct
  source 1..453: note = XENP46442 Chain 1- STEAP-A[STEAP1]_H1.192_IgG1_PVA_/S267K
QVQVQESGPGLVKPSQTLSLTCTVSGYSITSDYAWNWIRQPPGKKLEWIGYISNSGSTSYNPSLKSRVTISRDTSKNQFSLKLSSVTAADTAVYYCARERNYDYSVYYYAMDYWGQGTLVTVSSASTKGPSVFPLAPSSKSTSGGTAALGCLVKDYFPEPVTVSWNSGALTSGVHTFPAVLQSSGLYSLSSVVTVPSSSLGTQTYICNVNHKPSNTKVDKKVEPKSCDKTHTCPPCPAPPVAGPSVFLFPPKPKDTLMISRTPEVTCVVVDVKHEDPEVKFNWYVDGVEVHNAKTKPREEQYNSTYRVVSVLTVLHQDWLNGKEYKCKVSNKALPAPIEKTISKAKGQPREPQVYTLPPSREEMTKNQVSLTCLVKGFYPSDIAVEWESNGQPENNYKTTPPVLDSDGSFFLYSKLTVDKSRWQQGNVFSCSVMHEALHNHYTQKSLSLSPGK

SEQ ID NO: 1281 - protein, 220 aa, synthetic construct; identical to SEQ ID NO: 799
  source 1..220: note = XENP46442 Chain 2- STEAP-A[STEAP1]_L1.3_Light Chain

SEQ ID NO: 1282 - protein, 453 aa, synthetic construct
  source 1..453: note = XENP46443 Chain 1- STEAP-A[STEAP1]_H1.195_IgG1_PVA_/S267K
QVQVQESGPGLVKPSQTLSLTCTVSGYSITSDYAWNWIRQPPGKKLEWIGYIGNSGSTSYNPSLKSRVTISRDTSKNQFSLKLSSVTAADTAVYYCARERNYDYELYYYAMDYWGQGTLVTVSSASTKGPSVFPLAPSSKSTSGGTAALGCLVKDYFPEPVTVSWNSGALTSGVHTFPAVLQSSGLYSLSSVVTVPSSSLGTQTYICNVNHKPSNTKVDKKVEPKSCDKTHTCPPCPAPPVAGPSVFLFPPKPKDTLMISRTPEVTCVVVDVKHEDPEVKFNWYVDGVEVHNAKTKPREEQYNSTYRVVSVLTVLHQDWLNGKEYKCKVSNKALPAPIEKTISKAKGQPREPQVYTLPPSREEMTKNQVSLTCLVKGFYPSDIAVEWESNGQPENNYKTTPPVLDSDGSFFLYSKLTVDKSRWQQGNVFSCSVMHEALHNHYTQKSLSLSPGK

SEQ ID NO: 1283 - protein, 220 aa, synthetic construct; identical to SEQ ID NO: 799
  source 1..220: note = XENP46443 Chain 2- STEAP-A[STEAP1]_L1.3_Light Chain

SEQ ID NO: 1284 - protein, 453 aa, synthetic construct
  source 1..453: note = XENP46444 Chain 1- STEAP-A[STEAP1]_H1.196_IgG1_PVA_/S267K
QVQVQESGPGLVKPSQTLSLTCTVSGYSITSDYAWNWIRQPPGKKLEWIGYISNSGSTVYNPSLKSRVTISRDTSKNQFSLKLSSVTAADTAVYYCARERNYDYELYYYAMDYWGQGTLVTVSSASTKGPSVFPLAPSSKSTSGGTAALGCLVKDYFPEPVTVSWNSGALTSGVHTFPAVLQSSGLYSLSSVVTVPSSSLGTQTYICNVNHKPSNTKVDKKVEPKSCDKTHTCPPCPAPPVAGPSVFLFPPKPKDTLMISRTPEVTCVVVDVKHEDPEVKFNWYVDGVEVHNAKTKPREEQYNSTYRVVSVLTVLHQDWLNGKEYKCKVSNKALPAPIEKTISKAKGQPREPQVYTLPPSREEMTKNQVSLTCLVKGFYPSDIAVEWESNGQPENNYKTTPPVLDSDGSFFLYSKLTVDKSRWQQGNVFSCSVMHEALHNHYTQKSLSLSPGK

SEQ ID NO: 1285 - protein, 220 aa, synthetic construct; identical to SEQ ID NO: 799
  source 1..220: note = XENP46444 Chain 2- STEAP-A[STEAP1]_L1.3_Light Chain

SEQ ID NO: 1286 - protein, 453 aa, synthetic construct
  source 1..453: note = XENP46445 Chain 1- STEAP-A[STEAP1]_H1.197_IgG1_PVA_/S267K
QVQVQESGPGLVKPSQTLSLTCTVSGYSITSDYAWNWIRQPPGKKLEWIGYISNHGSTSYNPSLKSRVTISRDTSKNQFSLKLSSVTAADTAVYYCARERNYDYELYYYAMDYWGQGTLVTVSSASTKGPSVFPLAPSSKSTSGGTAALGCLVKDYFPEPVTVSWNSGALTSGVHTFPAVLQSSGLYSLSSVVTVPSSSLGTQTYICNVNHKPSNTKVDKKVEPKSCDKTHTCPPCPAPPVAGPSVFLFPPKPKDTLMISRTPEVTCVVVDVKHEDPEVKFNWYVDGVEVHNAKTKPREEQYNSTYRVVSVLTVLHQDWLNGKEYKCKVSNKALPAPIEKTISKAKGQPREPQVYTLPPSREEMTKNQVSLTCLVKGFYPSDIAVEWESNGQPENNYKTTPPVLDSDGSFFLYSKLTVDKSRWQQGNVFSCSVMHEALHNHYTQKSLSLSPGK

SEQ ID NO: 1287 - protein, 220 aa, synthetic construct; identical to SEQ ID NO: 799
  source 1..220: note = XENP46445 Chain 2- STEAP-A[STEAP1]_L1.3_Light Chain

SEQ ID NO: 1288 - protein, 453 aa, synthetic construct
  source 1..453: note = XENP46446 Chain 1- STEAP-A[STEAP1]_H1.198_IgG1_PVA_/S267K
QVQVQESGPGLVKPSQTLSLTCTVSGYSITSDYAWNWIRQPPGKKLEWIGYISNSGYTSYNPSLKSRVTISRDTSKNQFSLKLSSVTAADTAVYYCARERNYDYELYYYAMDYWGQGTLVTVSSASTKGPSVFPLAPSSKSTSGGTAALGCLVKDYFPEPVTVSWNSGALTSGVHTFPAVLQSSGLYSLSSVVTVPSSSLGTQTYICNVNHKPSNTKVDKKVEPKSCDKTHTCPPCPAPPVAGPSVFLFPPKPKDTLMISRTPEVTCVVVDVKHEDPEVKFNWYVDGVEVHNAKTKPREEQYNSTYRVVSVLTVLHQDWLNGKEYKCKVSNKALPAPIEKTISKAKGQPREPQVYTLPPSREEMTKNQVSLTCLVKGFYPSDIAVEWESNGQPENNYKTTPPVLDSDGSFFLYSKLTVDKSRWQQGNVFSCSVMHEALHNHYTQKSLSLSPGK

SEQ ID NO: 1289 - protein, 220 aa, synthetic construct; identical to SEQ ID NO: 799
  source 1..220: note = XENP46446 Chain 2- STEAP-A[STEAP1]_L1.3_Light Chain

SEQ ID NO: 1290 - protein, 453 aa, synthetic construct
  source 1..453: note = XENP46447 Chain 1- STEAP-A[STEAP1]_H1.199_IgG1_PVA_/S267K
QVQVQESGPGLVKPSQTLSLTCTVSGYSITSDYAWNWIRQPPGKKLEWIGYISNSGSKSYNPSLKSRVTISRDTSKNQFSLKLSSVTAADTAVYYCARERNYDYELYYYAMDYWGQGTLVTVSSASTKGPSVFPLAPSSKSTSGGTAALGCLVKDYFPEPVTVSWNSGALTSGVHTFPAVLQSSGLYSLSSVVTVPSSSLGTQTYICNVNHKPSNTKVDKKVEPKSCDKTHTCPPCPAPPVAGPSVFLFPPKPKDTLMISRTPEVTCVVVDVKHEDPEVKFNWYVDGVEVHNAKTKPREEQYNSTYRVVSVLTVLHQDWLNGKEYKCKVSNKALPAPIEKTISKAKGQPREPQVYTLPPSREEMTKNQVSLTCLVKGFYPSDIAVEWESNGQPENNYKTTPPVLDSDGSFFLYSKLTVDKSRWQQGNVFSCSVMHEALHNHYTQKSLSLSPGK

SEQ ID NO: 1291 - protein, 220 aa, synthetic construct; identical to SEQ ID NO: 799
  source 1..220: note = XENP46447 Chain 2- STEAP-A[STEAP1]_L1.3_Light Chain

SEQ ID NO: 1292 - protein, 453 aa, synthetic construct
  source 1..453: note = XENP46448 Chain 1- STEAP-A[STEAP1]_H1.200_IgG1_PVA_/S267K
QVQVQESGPGLVKPSQTLSLTCTVSGYSITSDYAWNWIRQPPGKKLEWIGYISNSGSTAYNPSLKSRVTISRDTSKNQFSLKLSSVTAADTAVYYCARERNYDYELYYYAMDYWGQGTLVTVSSASTKGPSVFPLAPSSKSTSGGTAALGCLVKDYFPEPVTVSWNSGALTSGVHTFPAVLQSSGLYSLSSVVTVPSSSLGTQTYICNVNHKPSNTKVDKKVEPKSCDKTHTCPPCPAPPVAGPSVFLFPPKPKDTLMISRTPEVTCVVVDVKHEDPEVKFNWYVDGVEVHNAKTKPREEQYNSTYRVVSVLTVLHQDWLNGKEYKCKVSNKALPAPIEKTISKAKGQPREPQVYTLPPSREEMTKNQVSLTCLVKGFYPSDIAVEWESNGQPENNYKTTPPVLDSDGSFFLYSKLTVDKSRWQQGNVFSCSVMHEALHNHYTQKSLSLSPGK

SEQ ID NO: 1293 - protein, 220 aa, synthetic construct; identical to SEQ ID NO: 799
  source 1..220: note = XENP46448 Chain 2- STEAP-A[STEAP1]_L1.3_Light Chain

SEQ ID NO: 1294 - protein, 453 aa, synthetic construct
  source 1..453: note = XENP46449 Chain 1- STEAP-A[STEAP1]_H1.201_IgG1_PVA_/S267K
QVQVQESGPGLVKPSQTLSLTCTVSGYSITSTYAWNWIRQPPGKKLEWIGYISNSGSTSYNPSLKSRVTISRDTSKNQFSLKLSSVTAADTAVYYCARERNYDYELYYYAMDYWGQGTLVTVSSASTKGPSVFPLAPSSKSTSGGTAALGCLVKDYFPEPVTVSWNSGALTSGVHTFPAVLQSSGLYSLSSVVTVPSSSLGTQTYICNVNHKPSNTKVDKKVEPKSCDKTHTCPPCPAPPVAGPSVFLFPPKPKDTLMISRTPEVTCVVVDVKHEDPEVKFNWYVDGVEVHNAKTKPREEQYNSTYRVVSVLTVLHQDWLNGKEYKCKVSNKALPAPIEKTISKAKGQPREPQVYTLPPSREEMTKNQVSLTCLVKGFYPSDIAVEWESNGQPENNYKTTPPVLDSDGSFFLYSKLTVDKSRWQQGNVFSCSVMHEALHNHYTQKSLSLSPGK

SEQ ID NO: 1295 - protein, 220 aa, synthetic construct; identical to SEQ ID NO: 799
  source 1..220: note = XENP46449 Chain 2- STEAP-A[STEAP1]_L1.3_Light Chain

SEQ ID NO: 1296 - protein, 453 aa, synthetic construct
  source 1..453: note = XENP46450 Chain 1- STEAP-A[STEAP1]_H1.202_IgG1_PVA_/S267K
QVQVQESGPGLVKPSQTLSLTCTVSGYSITSDYSWNWIRQPPGKKLEWIGYISNSGSTSYNPSLKSRVTISRDTSKNQFSLKLSSVTAADTAVYYCARERNYDYELYYYAMDYWGQGTLVTVSSASTKGPSVFPLAPSSKSTSGGTAALGCLVKDYFPEPVTVSWNSGALTSGVHTFPAVLQSSGLYSLSSVVTVPSSSLGTQTYICNVNHKPSNTKVDKKVEPKSCDKTHTCPPCPAPPVAGPSVFLFPPKPKDTLMISRTPEVTCVVVDVKHEDPEVKFNWYVDGVEVHNAKTKPREEQYNSTYRVVSVLTVLHQDWLNGKEYKCKVSNKALPAPIEKTISKAKGQPREPQVYTLPPSREEMTKNQVSLTCLVKGFYPSDIAVEWESNGQPENNYKTTPPVLDSDGSFFLYSKLTVDKSRWQQGNVFSCSVMHEALHNHYTQKSLSLSPGK

SEQ ID NO: 1297 - protein, 220 aa, synthetic construct; identical to SEQ ID NO: 799
  source 1..220: note = XENP46450 Chain 2- STEAP-A[STEAP1]_L1.3_Light Chain

SEQ ID NO: 1298 - protein, 453 aa, synthetic construct
  source 1..453: note = XENP46451 Chain 1- STEAP-A[STEAP1]_H1.203_IgG1_PVA_/S267K
QVQVQESGPGLVKPSQTLSLTCTVSGYSITSDYAWNWIRQPPGKKLEWIGYISHSGSTSYNPSLKSRVTISRDTSKNQFSLKLSSVTAADTAVYYCARERNYDYELYYYAMDYWGQGTLVTVSSASTKGPSVFPLAPSSKSTSGGTAALGCLVKDYFPEPVTVSWNSGALTSGVHTFPAVLQSSGLYSLSSVVTVPSSSLGTQTYICNVNHKPSNTKVDKKVEPKSCDKTHTCPPCPAPPVAGPSVFLFPPKPKDTLMISRTPEVTCVVVDVKHEDPEVKFNWYVDGVEVHNAKTKPREEQYNSTYRVVSVLTVLHQDWLNGKEYKCKVSNKALPAPIEKTISKAKGQPREPQVYTLPPSREEMTKNQVSLTCLVKGFYPSDIAVEWESNGQPENNYKTTPPVLDSDGSFFLYSKLTVDKSRWQQGNVFSCSVMHEALHNHYTQKSLSLSPGK

SEQ ID NO: 1299 - protein, 220 aa, synthetic construct; identical to SEQ ID NO: 799
  source 1..220: note = XENP46451 Chain 2- STEAP-A[STEAP1]_L1.3_Light Chain

SEQ ID NO: 1300 - protein, 453 aa, synthetic construct
  source 1..453: note = XENP46452 Chain 1- STEAP-A[STEAP1]_H1.204_IgG1_PVA_/S267K
QVQVQESGPGLVKPSQTLSLTCTVSGYSITSDYAWNWIRQPPGKKLEWIGYISNGGSTSYNPSLKSRVTISRDTSKNQFSLKLSSVTAADTAVYYCARERNYDYELYYYAMDYWGQGTLVTVSSASTKGPSVFPLAPSSKSTSGGTAALGCLVKDYFPEPVTVSWNSGALTSGVHTFPAVLQSSGLYSLSSVVTVPSSSLGTQTYICNVNHKPSNTKVDKKVEPKSCDKTHTCPPCPAPPVAGPSVFLFPPKPKDTLMISRTPEVTCVVVDVKHEDPEVKFNWYVDGVEVHNAKTKPREEQYNSTYRVVSVLTVLHQDWLNGKEYKCKVSNKALPAPIEKTISKAKGQPREPQVYTLPPSREEMTKNQVSLTCLVKGFYPSDIAVEWESNGQPENNYKTTPPVLDSDGSFFLYSKLTVDKSRWQQGNVFSCSVMHEALHNHYTQKSLSLSPGK

SEQ ID NO: 1301 - protein, 220 aa, synthetic construct; identical to SEQ ID NO: 799
  source 1..220: note = XENP46452 Chain 2- STEAP-A[STEAP1]_L1.3_Light Chain

SEQ ID NO: 1302 - protein, 453 aa, synthetic construct
  source 1..453: note = XENP46453 Chain 1- STEAP-A[STEAP1]_H1.205_IgG1_PVA_/S267K
QVQVQESGPGLVKPSQTLSLTCTVSGYSITSDYAWNWIRQPPGKKLEWIGYIGNSGSTVYNPSLKSRVTISRDTSKNQFSLKLSSVTAADTAVYYCARERNYDYELYYYAMDYWGQGTLVTVSSASTKGPSVFPLAPSSKSTSGGTAALGCLVKDYFPEPVTVSWNSGALTSGVHTFPAVLQSSGLYSLSSVVTVPSSSLGTQTYICNVNHKPSNTKVDKKVEPKSCDKTHTCPPCPAPPVAGPSVFLFPPKPKDTLMISRTPEVTCVVVDVKHEDPEVKFNWYVDGVEVHNAKTKPREEQYNSTYRVVSVLTVLHQDWLNGKEYKCKVSNKALPAPIEKTISKAKGQPREPQVYTLPPSREEMTKNQVSLTCLVKGFYPSDIAVEWESNGQPENNYKTTPPVLDSDGSFFLYSKLTVDKSRWQQGNVFSCSVMHEALHNHYTQKSLSLSPGK

SEQ ID NO: 1303 - protein, 220 aa, synthetic construct; identical to SEQ ID NO: 799
  source 1..220: note = XENP46453 Chain 2- STEAP-A[STEAP1]_L1.3_Light Chain

SEQ ID NO: 1304 - protein, 453 aa, synthetic construct
  source 1..453: note = XENP46454 Chain 1- STEAP-A[STEAP1]_H1.206_IgG1_PVA_/S267K
QVQVQESGPGLVKPSQTLSLTCTVSGYSITSTYAWNWIRQPPGKKLEWIGYIGNSGSTSYNPSLKSRVTISRDTSKNQFSLKLSSVTAADTAVYYCARERNYDYELYYYAMDYWGQGTLVTVSSASTKGPSVFPLAPSSKSTSGGTAALGCLVKDYFPEPVTVSWNSGALTSGVHTFPAVLQSSGLYSLSSVVTVPSSSLGTQTYICNVNHKPSNTKVDKKVEPKSCDKTHTCPPCPAPPVAGPSVFLFPPKPKDTLMISRTPEVTCVVVDVKHEDPEVKFNWYVDGVEVHNAKTKPREEQYNSTYRVVSVLTVLHQDWLNGKEYKCKVSNKALPAPIEKTISKAKGQPREPQVYTLPPSREEMTKNQVSLTCLVKGFYPSDIAVEWESNGQPENNYKTTPPVLDSDGSFFLYSKLTVDKSRWQQGNVFSCSVMHEALHNHYTQKSLSLSPGK

SEQ ID NO: 1305 - protein, 220 aa, synthetic construct; identical to SEQ ID NO: 799
  source 1..220: note = XENP46454 Chain 2- STEAP-A[STEAP1]_L1.3_Light Chain

SEQ ID NO: 1306 - protein, 453 aa, synthetic construct
  source 1..453: note = XENP46455 Chain 1- STEAP-A[STEAP1]_H1.207_IgG1_PVA_/S267K
QVQVQESGPGLVKPSQTLSLTCTVSGYSITSDYSWNWIRQPPGKKLEWIGYIGNSGSTSYNPSLKSRVTISRDTSKNQFSLKLSSVTAADTAVYYCARERNYDYELYYYAMDYWGQGTLVTVSSASTKGPSVFPLAPSSKSTSGGTAALGCLVKDYFPEPVTVSWNSGALTSGVHTFPAVLQSSGLYSLSSVVTVPSSSLGTQTYICNVNHKPSNTKVDKKVEPKSCDKTHTCPPCPAPPVAGPSVFLFPPKPKDTLMISRTPEVTCVVVDVKHEDPEVKFNWYVDGVEVHNAKTKPREEQYNSTYRVVSVLTVLHQDWLNGKEYKCKVSNKALPAPIEKTISKAKGQPREPQVYTLPPSREEMTKNQVSLTCLVKGFYPSDIAVEWESNGQPENNYKTTPPVLDSDGSFFLYSKLTVDKSRWQQGNVFSCSVMHEALHNHYTQKSLSLSPGK

SEQ ID NO: 1307 - protein, 220 aa, synthetic construct; identical to SEQ ID NO: 799
  source 1..220: note = XENP46455 Chain 2- STEAP-A[STEAP1]_L1.3_Light Chain

SEQ ID NO: 1308 - protein, 453 aa, synthetic construct
  source 1..453: note = XENP46456 Chain 1- STEAP-A[STEAP1]_H1.208_IgG1_PVA_/S267K
QVQVQESGPGLVKPSQTLSLTCTVSGYSITSDYAWNWIRQPPGKKLEWIGYIGHSGSTSYNPSLKSRVTISRDTSKNQFSLKLSSVTAADTAVYYCARERNYDYELYYYAMDYWGQGTLVTVSSASTKGPSVFPLAPSSKSTSGGTAALGCLVKDYFPEPVTVSWNSGALTSGVHTFPAVLQSSGLYSLSSVVTVPSSSLGTQTYICNVNHKPSNTKVDKKVEPKSCDKTHTCPPCPAPPVAGPSVFLFPPKPKDTLMISRTPEVTCVVVDVKHEDPEVKFNWYVDGVEVHNAKTKPREEQYNSTYRVVSVLTVLHQDWLNGKEYKCKVSNKALPAPIEKTISKAKGQPREPQVYTLPPSREEMTKNQVSLTCLVKGFYPSDIAVEWESNGQPENNYKTTPPVLDSDGSFFLYSKLTVDKSRWQQGNVFSCSVMHEALHNHYTQKSLSLSPGK

SEQ ID NO: 1309 - protein, 220 aa, synthetic construct; identical to SEQ ID NO: 799
  source 1..220: note = XENP46456 Chain 2- STEAP-A[STEAP1]_L1.3_Light Chain

SEQ ID NO: 1310 - protein, 453 aa, synthetic construct
  source 1..453: note = XENP46457 Chain 1- STEAP-A[STEAP1]_H1.209_IgG1_PVA_/S267K
QVQVQESGPGLVKPSQTLSLTCTVSGYSITSDYAWNWIRQPPGKKLEWIGYIGNGGSTSYNPSLKSRVTISRDTSKNQFSLKLSSVTAADTAVYYCARERNYDYELYYYAMDYWGQGTLVTVSSASTKGPSVFPLAPSSKSTSGGTAALGCLVKDYFPEPVTVSWNSGALTSGVHTFPAVLQSSGLYSLSSVVTVPSSSLGTQTYICNVNHKPSNTKVDKKVEPKSCDKTHTCPPCPAPPVAGPSVFLFPPKPKDTLMISRTPEVTCVVVDVKHEDPEVKFNWYVDGVEVHNAKTKPREEQYNSTYRVVSVLTVLHQDWLNGKEYKCKVSNKALPAPIEKTISKAKGQPREPQVYTLPPSREEMTKNQVSLTCLVKGFYPSDIAVEWESNGQPENNYKTTPPVLDSDGSFFLYSKLTVDKSRWQQGNVFSCSVMHEALHNHYTQKSLSLSPGK

SEQ ID NO: 1311 - protein, 220 aa, synthetic construct; identical to SEQ ID NO: 799
  source 1..220: note = XENP46457 Chain 2- STEAP-A[STEAP1]_L1.3_Light Chain

SEQ ID NO: 1312 - protein, 453 aa, synthetic construct
  source 1..453: note = XENP46458 Chain 1- STEAP-A[STEAP1]_H1.210_IgG1_PVA_/S267K
QVQVQESGPGLVKPSQTLSLTCTVSGYSITSDYAWNWIRQPPGKKLEWIGYIGNHGSTSYNPSLKSRVTISRDTSKNQFSLKLSSVTAADTAVYYCARERNYDYELYYYAMDYWGQGTLVTVSSASTKGPSVFPLAPSSKSTSGGTAALGCLVKDYFPEPVTVSWNSGALTSGVHTFPAVLQSSGLYSLSSVVTVPSSSLGTQTYICNVNHKPSNTKVDKKVEPKSCDKTHTCPPCPAPPVAGPSVFLFPPKPKDTLMISRTPEVTCVVVDVKHEDPEVKFNWYVDGVEVHNAKTKPREEQYNSTYRVVSVLTVLHQDWLNGKEYKCKVSNKALPAPIEKTISKAKGQPREPQVYTLPPSREEMTKNQVSLTCLVKGFYPSDIAVEWESNGQPENNYKTTPPVLDSDGSFFLYSKLTVDKSRWQQGNVFSCSVMHEALHNHYTQKSLSLSPGK

SEQ ID NO: 1313 - protein, 220 aa, synthetic construct; identical to SEQ ID NO: 799
  source 1..220: note = XENP46458 Chain 2- STEAP-A[STEAP1]_L1.3_Light Chain

SEQ ID NO: 1314 - protein, 453 aa, synthetic construct
  source 1..453: note = XENP46459 Chain 1- STEAP-A[STEAP1]_H1.211_IgG1_PVA_/S267K
QVQVQESGPGLVKPSQTLSLTCTVSGYSITSDYAWNWIRQPPGKKLEWIGYIGNSGYTSYNPSLKSRVTISRDTSKNQFSLKLSSVTAADTAVYYCARERNYDYELYYYAMDYWGQGTLVTVSSASTKGPSVFPLAPSSKSTSGGTAALGCLVKDYFPEPVTVSWNSGALTSGVHTFPAVLQSSGLYSLSSVVTVPSSSLGTQTYICNVNHKPSNTKVDKKVEPKSCDKTHTCPPCPAPPVAGPSVFLFPPKPKDTLMISRTPEVTCVVVDVKHEDPEVKFNWYVDGVEVHNAKTKPREEQYNSTYRVVSVLTVLHQDWLNGKEYKCKVSNKALPAPIEKTISKAKGQPREPQVYTLPPSREEMTKNQVSLTCLVKGFYPSDIAVEWESNGQPENNYKTTPPVLDSDGSFFLYSKLTVDKSRWQQGNVFSCSVMHEALHNHYTQKSLSLSPGK

SEQ ID NO: 1315 - protein, 220 aa, synthetic construct; identical to SEQ ID NO: 799
  source 1..220: note = XENP46459 Chain 2- STEAP-A[STEAP1]_L1.3_Light Chain

SEQ ID NO: 1316 - protein, 453 aa, synthetic construct
  source 1..453: note = XENP46460 Chain 1- STEAP-A[STEAP1]_H1.212_IgG1_PVA_/S267K
QVQVQESGPGLVKPSQTLSLTCTVSGYSITSDYAWNWIRQPPGKKLEWIGYIGNSGSKSYNPSLKSRVTISRDTSKNQFSLKLSSVTAADTAVYYCARERNYDYELYYYAMDYWGQGTLVTVSSASTKGPSVFPLAPSSKSTSGGTAALGCLVKDYFPEPVTVSWNSGALTSGVHTFPAVLQSSGLYSLSSVVTVPSSSLGTQTYICNVNHKPSNTKVDKKVEPKSCDKTHTCPPCPAPPVAGPSVFLFPPKPKDTLMISRTPEVTCVVVDVKHEDPEVKFNWYVDGVEVHNAKTKPREEQYNSTYRVVSVLTVLHQDWLNGKEYKCKVSNKALPAPIEKTISKAKGQPREPQVYTLPPSREEMTKNQVSLTCLVKGFYPSDIAVEWESNGQPENNYKTTPPVLDSDGSFFLYSKLTVDKSRWQQGNVFSCSVMHEALHNHYTQKSLSLSPGK

SEQ ID NO: 1317 - protein, 220 aa, synthetic construct; identical to SEQ ID NO: 799
  source 1..220: note = XENP46460 Chain 2- STEAP-A[STEAP1]_L1.3_Light Chain

SEQ ID NO: 1318 - protein, 453 aa, synthetic construct
  source 1..453: note = XENP46461 Chain 1- STEAP-A[STEAP1]_H1.213_IgG1_PVA_/S267K
QVQVQESGPGLVKPSQTLSLTCTVSGYSITSDYAWNWIRQPPGKKLEWIGYIGNSGSTAYNPSLKSRVTISRDTSKNQFSLKLSSVTAADTAVYYCARERNYDYELYYYAMDYWGQGTLVTVSSASTKGPSVFPLAPSSKSTSGGTAALGCLVKDYFPEPVTVSWNSGALTSGVHTFPAVLQSSGLYSLSSVVTVPSSSLGTQTYICNVNHKPSNTKVDKKVEPKSCDKTHTCPPCPAPPVAGPSVFLFPPKPKDTLMISRTPEVTCVVVDVKHEDPEVKFNWYVDGVEVHNAKTKPREEQYNSTYRVVSVLTVLHQDWLNGKEYKCKVSNKALPAPIEKTISKAKGQPREPQVYTLPPSREEMTKNQVSLTCLVKGFYPSDIAVEWESNGQPENNYKTTPPVLDSDGSFFLYSKLTVDKSRWQQGNVFSCSVMHEALHNHYTQKSLSLSPGK

SEQ ID NO: 1319 - protein, 220 aa, synthetic construct; identical to SEQ ID NO: 799
  source 1..220: note = XENP46461 Chain 2- STEAP-A[STEAP1]_L1.3_Light Chain

SEQ ID NO: 1320 - protein, 453 aa, synthetic construct
  source 1..453: note = XENP46462 Chain 1- STEAP-A[STEAP1]_H1.214_IgG1_PVA_/S267K
QVQVQESGPGLVKPSQTLSLTCTVSGYSITSTYAWNWIRQPPGKKLEWIGYISNSGSTVYNPSLKSRVTISRDTSKNQFSLKLSSVTAADTAVYYCARERNYDYELYYYAMDYWGQGTLVTVSSASTKGPSVFPLAPSSKSTSGGTAALGCLVKDYFPEPVTVSWNSGALTSGVHTFPAVLQSSGLYSLSSVVTVPSSSLGTQTYICNVNHKPSNTKVDKKVEPKSCDKTHTCPPCPAPPVAGPSVFLFPPKPKDTLMISRTPEVTCVVVDVKHEDPEVKFNWYVDGVEVHNAKTKPREEQYNSTYRVVSVLTVLHQDWLNGKEYKCKVSNKALPAPIEKTISKAKGQPREPQVYTLPPSREEMTKNQVSLTCLVKGFYPSDIAVEWESNGQPENNYKTTPPVLDSDGSFFLYSKLTVDKSRWQQGNVFSCSVMHEALHNHYTQKSLSLSPGK

SEQ ID NO: 1321 - protein, 220 aa, synthetic construct; identical to SEQ ID NO: 799
  source 1..220: note = XENP46462 Chain 2- STEAP-A[STEAP1]_L1.3_Light Chain

SEQ ID NO: 1322 - protein, 453 aa, synthetic construct
  source 1..453: note = XENP46463 Chain 1- STEAP-A[STEAP1]_H1.215_IgG1_PVA_/S267K
QVQVQESGPGLVKPSQTLSLTCTVSGYSITSDYSWNWIRQPPGKKLEWIGYISNSGSTVYNPSLKSRVTISRDTSKNQFSLKLSSVTAADTAVYYCARERNYDYELYYYAMDYWGQGTLVTVSSASTKGPSVFPLAPSSKSTSGGTAALGCLVKDYFPEPVTVSWNSGALTSGVHTFPAVLQSSGLYSLSSVVTVPSSSLGTQTYICNVNHKPSNTKVDKKVEPKSCDKTHTCPPCPAPPVAGPSVFLFPPKPKDTLMISRTPEVTCVVVDVKHEDPEVKFNWYVDGVEVHNAKTKPREEQYNSTYRVVSVLTVLHQDWLNGKEYKCKVSNKALPAPIEKTISKAKGQPREPQVYTLPPSREEMTKNQVSLTCLVKGFYPSDIAVEWESNGQPENNYKTTPPVLDSDGSFFLYSKLTVDKSRWQQGNVFSCSVMHEALHNHYTQKSLSLSPGK

SEQ ID NO: 1323 - protein, 220 aa, synthetic construct; identical to SEQ ID NO: 799
  source 1..220: note = XENP46463 Chain 2- STEAP-A[STEAP1]_L1.3_Light Chain

SEQ ID NO: 1324 - protein, 453 aa, synthetic construct
  source 1..453: note = XENP46464 Chain 1- STEAP-A[STEAP1]_H1.216_IgG1_PVA_/S267K
QVQVQESGPGLVKPSQTLSLTCTVSGYSITSDYAWNWIRQPPGKKLEWIGYISHSGSTVYNPSLKSRVTISRDTSKNQFSLKLSSVTAADTAVYYCARERNYDYELYYYAMDYWGQGTLVTVSSASTKGPSVFPLAPSSKSTSGGTAALGCLVKDYFPEPVTVSWNSGALTSGVHTFPAVLQSSGLYSLSSVVTVPSSSLGTQTYICNVNHKPSNTKVDKKVEPKSCDKTHTCPPCPAPPVAGPSVFLFPPKPKDTLMISRTPEVTCVVVDVKHEDPEVKFNWYVDGVEVHNAKTKPREEQYNSTYRVVSVLTVLHQDWLNGKEYKCKVSNKALPAPIEKTISKAKGQPREPQVYTLPPSREEMTKNQVSLTCLVKGFYPSDIAVEWESNGQPENNYKTTPPVLDSDGSFFLYSKLTVDKSRWQQGNVFSCSVMHEALHNHYTQKSLSLSPGK

SEQ ID NO: 1325 - protein, 220 aa, synthetic construct; identical to SEQ ID NO: 799
  source 1..220: note = XENP46464 Chain 2- STEAP-A[STEAP1]_L1.3_Light Chain

SEQ ID NO: 1326 - protein, 453 aa, synthetic construct
  source 1..453: note = XENP46465 Chain 1- STEAP-A[STEAP1]_H1.217_IgG1_PVA_/S267K
QVQVQESGPGLVKPSQTLSLTCTVSGYSITSDYAWNWIRQPPGKKLEWIGYISNGGSTVYNPSLKSRVTISRDTSKNQFSLKLSSVTAADTAVYYCARERNYDYELYYYAMDYWGQGTLVTVSSASTKGPSVFPLAPSSKSTSGGTAALGCLVKDYFPEPVTVSWNSGALTSGVHTFPAVLQSSGLYSLSSVVTVPSSSLGTQTYICNVNHKPSNTKVDKKVEPKSCDKTHTCPPCPAPPVAGPSVFLFPPKPKDTLMISRTPEVTCVVVDVKHEDPEVKFNWYVDGVEVHNAKTKPREEQYNSTYRVVSVLTVLHQDWLNGKEYKCKVSNKALPAPIEKTISKAKGQPREPQVYTLPPSREEMTKNQVSLTCLVKGFYPSDIAVEWESNGQPENNYKTTPPVLDSDGSFFLYSKLTVDKSRWQQGNVFSCSVMHEALHNHYTQKSLSLSPGK

SEQ ID NO: 1327 - protein, 220 aa, synthetic construct; identical to SEQ ID NO: 799
  source 1..220: note = XENP46465 Chain 2- STEAP-A[STEAP1]_L1.3_Light Chain

SEQ ID NO: 1328 - protein, 453 aa, synthetic construct
  source 1..453: note = XENP46466 Chain 1- STEAP-A[STEAP1]_H1.218_IgG1_PVA_/S267K
QVQVQESGPGLVKPSQTLSLTCTVSGYSITSDYAWNWIRQPPGKKLEWIGYISNHGSTVYNPSLKSRVTISRDTSKNQFSLKLSSVTAADTAVYYCARERNYDYELYYYAMDYWGQGTLVTVSSASTKGPSVFPLAPSSKSTSGGTAALGCLVKDYFPEPVTVSWNSGALTSGVHTFPAVLQSSGLYSLSSVVTVPSSSLGTQTYICNVNHKPSNTKVDKKVEPKSCDKTHTCPPCPAPPVAGPSVFLFPPKPKDTLMISRTPEVTCVVVDVKHEDPEVKFNWYVDGVEVHNAKTKPREEQYNSTYRVVSVLTVLHQDWLNGKEYKCKVSNKALPAPIEKTISKAKGQPREPQVYTLPPSREEMTKNQVSLTCLVKGFYPSDIAVEWESNGQPENNYKTTPPVLDSDGSFFLYSKLTVDKSRWQQGNVFSCSVMHEALHNHYTQKSLSLSPGK

SEQ ID NO: 1329 - protein, 220 aa, synthetic construct; identical to SEQ ID NO: 799
  source 1..220: note = XENP46466 Chain 2- STEAP-A[STEAP1]_L1.3_Light Chain

SEQ ID NO: 1330 - protein, 453 aa, synthetic construct
  source 1..453: note = XENP46467 Chain 1- STEAP-A[STEAP1]_H1.219_IgG1_PVA_/S267K
QVQVQESGPGLVKPSQTLSLTCTVSGYSITSDYAWNWIRQPPGKKLEWIGYISNSGYTVYNPSLKSRVTISRDTSKNQFSLKLSSVTAADTAVYYCARERNYDYELYYYAMDYWGQGTLVTVSSASTKGPSVFPLAPSSKSTSGGTAALGCLVKDYFPEPVTVSWNSGALTSGVHTFPAVLQSSGLYSLSSVVTVPSSSLGTQTYICNVNHKPSNTKVDKKVEPKSCDKTHTCPPCPAPPVAGPSVFLFPPKPKDTLMISRTPEVTCVVVDVKHEDPEVKFNWYVDGVEVHNAKTKPREEQYNSTYRVVSVLTVLHQDWLNGKEYKCKVSNKALPAPIEKTISKAKGQPREPQVYTLPPSREEMTKNQVSLTCLVKGFYPSDIAVEWESNGQPENNYKTTPPVLDSDGSFFLYSKLTVDKSRWQQGNVFSCSVMHEALHNHYTQKSLSLSPGK

SEQ ID NO: 1331 - protein, 220 aa, synthetic construct; identical to SEQ ID NO: 799
  source 1..220: note = XENP46467 Chain 2- STEAP-A[STEAP1]_L1.3_Light Chain

SEQ ID NO: 1332 - protein, 453 aa, synthetic construct
  source 1..453: note = XENP46468 Chain 1- STEAP-A[STEAP1]_H1.220_IgG1_PVA_/S267K
QVQVQESGPGLVKPSQTLSLTCTVSGYSITSDYAWNWIRQPPGKKLEWIGYISNSGSKVYNPSLKSRVTISRDTSKNQFSLKLSSVTAADTAVYYCARERNYDYELYYYAMDYWGQGTLVTVSSASTKGPSVFPLAPSSKSTSGGTAALGCLVKDYFPEPVTVSWNSGALTSGVHTFPAVLQSSGLYSLSSVVTVPSSSLGTQTYICNVNHKPSNTKVDKKVEPKSCDKTHTCPPCPAPPVAGPSVFLFPPKPKDTLMISRTPEVTCVVVDVKHEDPEVKFNWYVDGVEVHNAKTKPREEQYNSTYRVVSVLTVLHQDWLNGKEYKCKVSNKALPAPIEKTISKAKGQPREPQVYTLPPSREEMTKNQVSLTCLVKGFYPSDIAVEWESNGQPENNYKTTPPVLDSDGSFFLYSKLTVDKSRWQQGNVFSCSVMHEALHNHYTQKSLSLSPGK

SEQ ID NO: 1333 - protein, 220 aa, synthetic construct; identical to SEQ ID NO: 799
  source 1..220: note = XENP46468 Chain 2- STEAP-A[STEAP1]_L1.3_Light Chain

SEQ ID NO: 1334 - protein, 453 aa, synthetic construct
  source 1..453: note = XENP46469 Chain 1- STEAP-A[STEAP1]_H1.221_IgG1_PVA_/S267K
QVQVQESGPGLVKPSQTLSLTCTVSGYSITSDYAWNWIRQPPGKKLEWIGYISNHGYTSYNPSLKSRVTISRDTSKNQFSLKLSSVTAADTAVYYCARERNYDYELYYYAMDYWGQGTLVTVSSASTKGPSVFPLAPSSKSTSGGTAALGCLVKDYFPEPVTVSWNSGALTSGVHTFPAVLQSSGLYSLSSVVTVPSSSLGTQTYICNVNHKPSNTKVDKKVEPKSCDKTHTCPPCPAPPVAGPSVFLFPPKPKDTLMISRTPEVTCVVVDVKHEDPEVKFNWYVDGVEVHNAKTKPREEQYNSTYRVVSVLTVLHQDWLNGKEYKCKVSNKALPAPIEKTISKAKGQPREPQVYTLPPSREEMTKNQVSLTCLVKGFYPSDIAVEWESNGQPENNYKTTPPVLDSDGSFFLYSKLTVDKSRWQQGNVFSCSVMHEALHNHYTQKSLSLSPGK

SEQ ID NO: 1335 - protein, 220 aa, synthetic construct; identical to SEQ ID NO: 799
  source 1..220: note = XENP46469 Chain 2- STEAP-A[STEAP1]_L1.3_Light Chain

SEQ ID NO: 1336 - protein, 453 aa, synthetic construct
  source 1..453: note = XENP46470 Chain 1- STEAP-A[STEAP1]_H1.222_IgG1_PVA_/S267K
QVQVQESGPGLVKPSQTLSLTCTVSGYSITSDYAWNWIRQPPGKKLEWIGYISNHGSKSYNPSLKSRVTISRDTSKNQFSLKLSSVTAADTAVYYCARERNYDYELYYYAMDYWGQGTLVTVSSASTKGPSVFPLAPSSKSTSGGTAALGCLVKDYFPEPVTVSWNSGALTSGVHTFPAVLQSSGLYSLSSVVTVPSSSLGTQTYICNVNHKPSNTKVDKKVEPKSCDKTHTCPPCPAPPVAGPSVFLFPPKPKDTLMISRTPEVTCVVVDVKHEDPEVKFNWYVDGVEVHNAKTKPREEQYNSTYRVVSVLTVLHQDWLNGKEYKCKVSNKALPAPIEKTISKAKGQPREPQVYTLPPSREEMTKNQVSLTCLVKGFYPSDIAVEWESNGQPENNYKTTPPVLDSDGSFFLYSKLTVDKSRWQQGNVFSCSVMHEALHNHYTQKSLSLSPGK

SEQ ID NO: 1337 - protein, 220 aa, synthetic construct; identical to SEQ ID NO: 799
  source 1..220: note = XENP46470 Chain 2- STEAP-A[STEAP1]_L1.3_Light Chain

SEQ ID NO: 1338 - protein, 453 aa, synthetic construct
  source 1..453: note = XENP46471 Chain 1- STEAP-A[STEAP1]_H1.223_IgG1_PVA_/S267K
QVQVQESGPGLVKPSQTLSLTCTVSGYSITSDYAWNWIRQPPGKKLEWIGYISNHGSTAYNPSLKSRVTISRDTSKNQFSLKLSSVTAADTAVYYCARERNYDYELYYYAMDYWGQGTLVTVSSASTKGPSVFPLAPSSKSTSGGTAALGCLVKDYFPEPVTVSWNSGALTSGVHTFPAVLQSSGLYSLSSVVTVPSSSLGTQTYICNVNHKPSNTKVDKKVEPKSCDKTHTCPPCPAPPVAGPSVFLFPPKPKDTLMISRTPEVTCVVVDVKHEDPEVKFNWYVDGVEVHNAKTKPREEQYNSTYRVVSVLTVLHQDWLNGKEYKCKVSNKALPAPIEKTISKAKGQPREPQVYTLPPSREEMTKNQVSLTCLVKGFYPSDIAVEWESNGQPENNYKTTPPVLDSDGSFFLYSKLTVDKSRWQQGNVFSCSVMHEALHNHYTQKSLSLSPGK

SEQ ID NO: 1339 - protein, 220 aa, synthetic construct; identical to SEQ ID NO: 799
  source 1..220: note = XENP46471 Chain 2- STEAP-A[STEAP1]_L1.3_Light Chain

SEQ ID NO: 1340 - protein, 453 aa, synthetic construct
  source 1..453: note = XENP46472 Chain 1- STEAP-A[STEAP1]_H1.224_IgG1_PVA_/S267K
QVQVQESGPGLVKPSQTLSLTCTVSGYSITSDYAWNWIRQPPGKKLEWIGYISNSGYKSYNPSLKSRVTISRDTSKNQFSLKLSSVTAADTAVYYCARERNYDYELYYYAMDYWGQGTLVTVSSASTKGPSVFPLAPSSKSTSGGTAALGCLVKDYFPEPVTVSWNSGALTSGVHTFPAVLQSSGLYSLSSVVTVPSSSLGTQTYICNVNHKPSNTKVDKKVEPKSCDKTHTCPPCPAPPVAGPSVFLFPPKPKDTLMISRTPEVTCVVVDVKHEDPEVKFNWYVDGVEVHNAKTKPREEQYNSTYRVVSVLTVLHQDWLNGKEYKCKVSNKALPAPIEKTISKAKGQPREPQVYTLPPSREEMTKNQVSLTCLVKGFYPSDIAVEWESNGQPENNYKTTPPVLDSDGSFFLYSKLTVDKSRWQQGNVFSCSVMHEALHNHYTQKSLSLSPGK

SEQ ID NO: 1341 - protein, 220 aa, synthetic construct; identical to SEQ ID NO: 799
  source 1..220: note = XENP46472 Chain 2- STEAP-A[STEAP1]_L1.3_Light Chain

SEQ ID NO: 1342 - protein, 453 aa, synthetic construct
  source 1..453: note = XENP46473 Chain 1- STEAP-A[STEAP1]_H1.225_IgG1_PVA_/S267K
QVQVQESGPGLVKPSQTLSLTCTVSGYSITSDYAWNWIRQPPGKKLEWIGYISNSGYTAYNPSLKSRVTISRDTSKNQFSLKLSSVTAADTAVYYCARERNYDYELYYYAMDYWGQGTLVTVSSASTKGPSVFPLAPSSKSTSGGTAALGCLVKDYFPEPVTVSWNSGALTSGVHTFPAVLQSSGLYSLSSVVTVPSSSLGTQTYICNVNHKPSNTKVDKKVEPKSCDKTHTCPPCPAPPVAGPSVFLFPPKPKDTLMISRTPEVTCVVVDVKHEDPEVKFNWYVDGVEVHNAKTKPREEQYNSTYRVVSVLTVLHQDWLNGKEYKCKVSNKALPAPIEKTISKAKGQPREPQVYTLPPSREEMTKNQVSLTCLVKGFYPSDIAVEWESNGQPENNYKTTPPVLDSDGSFFLYSKLTVDKSRWQQGNVFSCSVMHEALHNHYTQKSLSLSPGK

SEQ ID NO: 1343 - protein, 220 aa, synthetic construct; identical to SEQ ID NO: 799
  source 1..220: note = XENP46473 Chain 2- STEAP-A[STEAP1]_L1.3_Light Chain

SEQ ID NO: 1344 - protein, 453 aa, synthetic construct
  source 1..453: note = XENP46474 Chain 1- STEAP-A[STEAP1]_H1.226_IgG1_PVA_/S267K
QVQVQESGPGLVKPSQTLSLTCTVSGYSITSDYAWNWIRQPPGKKLEWIGYISNSGSKAYNPSLKSRVTISRDTSKNQFSLKLSSVTAADTAVYYCARERNYDYELYYYAMDYWGQGTLVTVSSASTKGPSVFPLAPSSKSTSGGTAALGCLVKDYFPEPVTVSWNSGALTSGVHTFPAVLQSSGLYSLSSVVTVPSSSLGTQTYICNVNHKPSNTKVDKKVEPKSCDKTHTCPPCPAPPVAGPSVFLFPPKPKDTLMISRTPEVTCVVVDVKHEDPEVKFNWYVDGVEVHNAKTKPREEQYNSTYRVVSVLTVLHQDWLNGKEYKCKVSNKALPAPIEKTISKAKGQPREPQVYTLPPSREEMTKNQVSLTCLVKGFYPSDIAVEWESNGQPENNYKTTPPVLDSDGSFFLYSKLTVDKSRWQQGNVFSCSVMHEALHNHYTQKSLSLSPGK

SEQ ID NO: 1345 - protein, 220 aa, synthetic construct; identical to SEQ ID NO: 799
  source 1..220: note = XENP46474 Chain 2- STEAP-A[STEAP1]_L1.3_Light Chain

SEQ ID NO: 1346 - protein, 453 aa, synthetic construct
  source 1..453: note = XENP46475 Chain 1- STEAP-A[STEAP1]_H1.227_IgG1_PVA_/S267K
QVQVQESGPGLVKPSQTLSLTCTVSGYSITSTYAWNWIRQPPGKKLEWIGYIGNSGSTVYNPSLKSRVTISRDTSKNQFSLKLSSVTAADTAVYYCARERNYDYELYYYAMDYWGQGTLVTVSSASTKGPSVFPLAPSSKSTSGGTAALGCLVKDYFPEPVTVSWNSGALTSGVHTFPAVLQSSGLYSLSSVVTVPSSSLGTQTYICNVNHKPSNTKVDKKVEPKSCDKTHTCPPCPAPPVAGPSVFLFPPKPKDTLMISRTPEVTCVVVDVKHEDPEVKFNWYVDGVEVHNAKTKPREEQYNSTYRVVSVLTVLHQDWLNGKEYKCKVSNKALPAPIEKTISKAKGQPREPQVYTLPPSREEMTKNQVSLTCLVKGFYPSDIAVEWESNGQPENNYKTTPPVLDSDGSFFLYSKLTVDKSRWQQGNVFSCSVMHEALHNHYTQKSLSLSPGK

SEQ ID NO: 1347 - protein, 220 aa, synthetic construct; identical to SEQ ID NO: 799
  source 1..220: note = XENP46475 Chain 2- STEAP-A[STEAP1]_L1.3_Light Chain

SEQ ID NO: 1348 - protein, 453 aa, synthetic construct
  source 1..453: note = XENP46476 Chain 1- STEAP-A[STEAP1]_H1.228_IgG1_PVA_/S267K
QVQVQESGPGLVKPSQTLSLTCTVSGYSITSDYSWNWIRQPPGKKLEWIGYIGNSGSTVYNPSLKSRVTISRDTSKNQFSLKLSSVTAADTAVYYCARERNYDYELYYYAMDYWGQGTLVTVSSASTKGPSVFPLAPSSKSTSGGTAALGCLVKDYFPEPVTVSWNSGALTSGVHTFPAVLQSSGLYSLSSVVTVPSSSLGTQTYICNVNHKPSNTKVDKKVEPKSCDKTHTCPPCPAPPVAGPSVFLFPPKPKDTLMISRTPEVTCVVVDVKHEDPEVKFNWYVDGVEVHNAKTKPREEQYNSTYRVVSVLTVLHQDWLNGKEYKCKVSNKALPAPIEKTISKAKGQPREPQVYTLPPSREEMTKNQVSLTCLVKGFYPSDIAVEWESNGQPENNYKTTPPVLDSDGSFFLYSKLTVDKSRWQQGNVFSCSVMHEALHNHYTQKSLSLSPGK

SEQ ID NO: 1349 - protein, 220 aa, synthetic construct; identical to SEQ ID NO: 799
  source 1..220: note = XENP46476 Chain 2- STEAP-A[STEAP1]_L1.3_Light Chain

SEQ ID NO: 1350 - protein, 453 aa, synthetic construct; identical to SEQ ID NO: 758
  source 1..453: note = XENP46477 Chain 1- STEAP-A[STEAP1]_H1.21_IgG1_PVA_/S267K

SEQ ID NO: 1351 - protein, 220 aa, synthetic construct
  source 1..220: note = XENP46477 Chain 2- STEAP-A[STEAP1]_L1.92_Light Chain
DIVMTQSPDSLAVSLGERATINCKSSQSLLYRSNQRNYLAWYQQKPGQPPKLLIYWASTRESGVPDRFSGSGSGTDFTLTISSLQAEDVAVYYCQQYYNYPRTFGGGTKVEIKRTVAAPSVFIFPPSDEQLKSGTASVVCLLNNFYPREAKVQWKVDNALQSGNSQESVTEQDSKDSTYSLSSTLTLSKADYEKHKVYACEVTHQGLSSPVTKSFNRGEC

SEQ ID NO: 1352 - protein, 453 aa, synthetic construct; identical to SEQ ID NO: 758
  source 1..453: note = XENP46478 Chain 1- STEAP-A[STEAP1]_H1.21_IgG1_PVA_/S267K

SEQ ID NO: 1353 - protein, 220 aa, synthetic construct
  source 1..220: note = XENP46478 Chain 2- STEAP-A[STEAP1]_L1.93_Light Chain
DIVMTQSPDSLAVSLGERATINCKSSQSLLYRSNQKNYLAWYQQKPGQPPKLLIYWALTRESGVPDRFSGSGSGTDFTLTISSLQAEDVAVYYCQQYYNYPRTFGGGTKVEIKRTVAAPSVFIFPPSDEQLKSGTASVVCLLNNFYPREAKVQWKVDNALQSGNSQESVTEQDSKDSTYSLSSTLTLSKADYEKHKVYACEVTHQGLSSPVTKSFNRGEC

SEQ ID NO: 1354 - protein, 453 aa, synthetic construct; identical to SEQ ID NO: 758
  source 1..453: note = XENP46479 Chain 1- STEAP-A[STEAP1]_H1.21_IgG1_PVA_/S267K

SEQ ID NO: 1355 - protein, 220 aa, synthetic construct
  source 1..220: note = XENP46479 Chain 2- STEAP-A[STEAP1]_L1.94_Light Chain
DIVMTQSPDSLAVSLGERATINCKSSQSLLYRSNQKNYLAWYQQKPGQPPKLLIYWAYTRESGVPDRFSGSGSGTDFTLTISSLQAEDVAVYYCQQYYNYPRTFGGGTKVEIKRTVAAPSVFIFPPSDEQLKSGTASVVCLLNNFYPREAKVQWKVDNALQSGNSQESVTEQDSKDSTYSLSSTLTLSKADYEKHKVYACEVTHQGLSSPVTKSFNRGEC

SEQ ID NO: 1356 - protein, 453 aa, synthetic construct; identical to SEQ ID NO: 758
  source 1..453: note = XENP46480 Chain 1- STEAP-A[STEAP1]_H1.21_IgG1_PVA_/S267K

SEQ ID NO: 1357 - protein, 220 aa, synthetic construct
  source 1..220: note = XENP46480 Chain 2- STEAP-A[STEAP1]_L1.95_Light Chain
DIVMTQSPDSLAVSLGERATINCKSSQSLLYRSNQKNYLAWYQQKPGQPPKLLIYWASKRESGVPDRFSGSGSGTDFTLTISSLQAEDVAVYYCQQYYNYPRTFGGGTKVEIKRTVAAPSVFIFPPSDEQLKSGTASVVCLLNNFYPREAKVQWKVDNALQSGNSQESVTEQDSKDSTYSLSSTLTLSKADYEKHKVYACEVTHQGLSSPVTKSFNRGEC

SEQ ID NO: 1358 - protein, 453 aa, synthetic construct; identical to SEQ ID NO: 758
  source 1..453: note = XENP46481 Chain 1- STEAP-A[STEAP1]_H1.21_IgG1_PVA_/S267K

SEQ ID NO: 1359 - protein, 220 aa, synthetic construct
  source 1..220: note = XENP46481 Chain 2- STEAP-A[STEAP1]_L1.96_Light Chain
DIVMTQSPDSLAVSLGERATINCKSSQTLLYRSNQKNYLAWYQQKPGQPPKLLIYWASTRESGVPDRFSGSGSGTDFTLTISSLQAEDVAVYYCQQYYNYPRTFGGGTKVEIKRTVAAPSVFIFPPSDEQLKSGTASVVCLLNNFYPREAKVQWKVDNALQSGNSQESVTEQDSKDSTYSLSSTLTLSKADYEKHKVYACEVTHQGLSSPVTKSFNRGEC

SEQ ID NO: 1360 - protein, 453 aa, synthetic construct; identical to SEQ ID NO: 758
  source 1..453: note = XENP46482 Chain 1- STEAP-A[STEAP1]_H1.21_IgG1_PVA_/S267K

SEQ ID NO: 1361 - protein, 220 aa, synthetic construct
  source 1..220: note = XENP46482 Chain 2- STEAP-A[STEAP1]_L1.97_Light Chain
DIVMTQSPDSLAVSLGERATINCKSSQSLLYRSNQKNYLAWYQQKPGQPPKLLIYWASTRESGVPDRFSGSGSGTDFTLTISSLQAEDVAVYYCQQYYKYPRTFGGGTKVEIKRTVAAPSVFIFPPSDEQLKSGTASVVCLLNNFYPREAKVQWKVDNALQSGNSQESVTEQDSKDSTYSLSSTLTLSKADYEKHKVYACEVTHQGLSSPVTKSFNRGEC

SEQ ID NO: 1362 - protein, 453 aa, synthetic construct; identical to SEQ ID NO: 758
  source 1..453: note = XENP46483 Chain 1- STEAP-A[STEAP1]_H1.21_IgG1_PVA_/S267K

SEQ ID NO: 1363 - protein, 220 aa, synthetic construct
  source 1..220: note = XENP46483 Chain 2- STEAP-A[STEAP1]_L1.98_Light Chain
DIVMTQSPDSLAVSLGERATINCKSSQTLLYRSNQRNYLAWYQQKPGQPPKLLIYWASTRESGVPDRFSGSGSGTDFTLTISSLQAEDVAVYYCQQYYNYPRTFGGGTKVEIKRTVAAPSVFIFPPSDEQLKSGTASVVCLLNNFYPREAKVQWKVDNALQSGNSQESVTEQDSKDSTYSLSSTLTLSKADYEKHKVYACEVTHQGLSSPVTKSFNRGEC

SEQ ID NO: 1364 - protein, 453 aa, synthetic construct; identical to SEQ ID NO: 758
  source 1..453: note = XENP46484 Chain 1- STEAP-A[STEAP1]_H1.21_IgG1_PVA_/S267K

SEQ ID NO: 1365 - protein, 220 aa, synthetic construct
  source 1..220: note = XENP46484 Chain 2- STEAP-A[STEAP1]_L1.99_Light Chain
DIVMTQSPDSLAVSLGERATINCKSSQTLLYRSNQKNYLAWYQQKPGQPPKLLIYWALTRESGVPDRFSGSGSGTDFTLTISSLQAEDVAVYYCQQYYNYPRTFGGGTKVEIKRTVAAPSVFIFPPSDEQLKSGTASVVCLLNNFYPREAKVQWKVDNALQSGNSQESVTEQDSKDSTYSLSSTLTLSKADYEKHKVYACEVTHQGLSSPVTKSFNRGEC

SEQ ID NO: 1366 - protein, 453 aa, synthetic construct; identical to SEQ ID NO: 758
  source 1..453: note = XENP46485 Chain 1- STEAP-A[STEAP1]_H1.21_IgG1_PVA_/S267K

SEQ ID NO: 1367 - protein, 220 aa, synthetic construct; identical to SEQ ID NO: 514
  source 1..220: note = XENP46485 Chain 2- STEAP-A[STEAP1]_L1.100_Light Chain

SEQ ID NO: 1368 - protein, 453 aa, synthetic construct; identical to SEQ ID NO: 758
  source 1..453: note = XENP46486 Chain 1- STEAP-A[STEAP1]_H1.21_IgG1_PVA_/S267K

SEQ ID NO: 1369 - protein, 220 aa, synthetic construct
  source 1..220: note = XENP46486 Chain 2- STEAP-A[STEAP1]_L1.101_Light Chain
DIVMTQSPDSLAVSLGERATINCKSSQTLLYRSNQKNYLAWYQQKPGQPPKLLIYWASKRESGVPDRFSGSGSGTDFTLTISSLQAEDVAVYYCQQYYNYPRTFGGGTKVEIKRTVAAPSVFIFPPSDEQLKSGTASVVCLLNNFYPREAKVQWKVDNALQSGNSQESVTEQDSKDSTYSLSSTLTLSKADYEKHKVYACEVTHQGLSSPVTKSFNRGEC

SEQ ID NO: 1370 - protein, 453 aa, synthetic construct; identical to SEQ ID NO: 758
  source 1..453: note = XENP46487 Chain 1- STEAP-A[STEAP1]_H1.21_IgG1_PVA_/S267K

SEQ ID NO: 1371 - protein, 220 aa, synthetic construct
  source 1..220: note = XENP46487 Chain 2- STEAP-A[STEAP1]_L1.102_Light Chain
DIVMTQSPDSLAVSLGERATINCKSSQTLLYRSNQKNYLAWYQQKPGQPPKLLIYWASTRESGVPDRFSGSGSGTDFTLTISSLQAEDVAVYYCQQYYKYPRTFGGGTKVEIKRTVAAPSVFIFPPSDEQLKSGTASVVCLLNNFYPREAKVQWKVDNALQSGNSQESVTEQDSKDSTYSLSSTLTLSKADYEKHKVYACEVTHQGLSSPVTKSFNRGEC

SEQ ID NO: 1372 - protein, 453 aa, synthetic construct; identical to SEQ ID NO: 758
  source 1..453: note = XENP46488 Chain 1- STEAP-A[STEAP1]_H1.21_IgG1_PVA_/S267K

SEQ ID NO: 1373 - protein, 220 aa, synthetic construct
  source 1..220: note = XENP46488 Chain 2- STEAP-A[STEAP1]_L1.103_Light Chain
DIVMTQSPDSLAVSLGERATINCKSSQSLLYRSNQRNYLAWYQQKPGQPPKLLIYWALTRESGVPDRFSGSGSGTDFTLTISSLQAEDVAVYYCQQYYNYPRTFGGGTKVEIKRTVAAPSVFIFPPSDEQLKSGTASVVCLLNNFYPREAKVQWKVDNALQSGNSQESVTEQDSKDSTYSLSSTLTLSKADYEKHKVYACEVTHQGLSSPVTKSFNRGEC

SEQ ID NO: 1374 - protein, 453 aa, synthetic construct; identical to SEQ ID NO: 758
  source 1..453: note = XENP46489 Chain 1- STEAP-A[STEAP1]_H1.21_IgG1_PVA_/S267K

SEQ ID NO: 1375 - protein, 220 aa, synthetic construct
  source 1..220: note = XENP46489 Chain 2- STEAP-A[STEAP1]_L1.104_Light Chain
DIVMTQSPDSLAVSLGERATINCKSSQSLLYRSNQRNYLAWYQQKPGQPPKLLIYWAYTRESGVPDRFSGSGSGTDFTLTISSLQAEDVAVYYCQQYYNYPRTFGGGTKVEIKRTVAAPSVFIFPPSDEQLKSGTASVVCLLNNFYPREAKVQWKVDNALQSGNSQESVTEQDSKDSTYSLSSTLTLSKADYEKHKVYACEVTHQGLSSPVTKSFNRGEC

SEQ ID NO: 1376 - protein, 453 aa, synthetic construct; identical to SEQ ID NO: 758
  source 1..453: note = XENP46490 Chain 1- STEAP-A[STEAP1]_H1.21_IgG1_PVA_/S267K

SEQ ID NO: 1377 - protein, 220 aa, synthetic construct
  source 1..220: note = XENP46490 Chain 2- STEAP-A[STEAP1]_L1.105_Light Chain
DIVMTQSPDSLAVSLGERATINCKSSQSLLYRSNQRNYLAWYQQKPGQPPKLLIYWASKRESGVPDRFSGSGSGTDFTLTISSLQAEDVAVYYCQQYYNYPRTFGGGTKVEIKRTVAAPSVFIFPPSDEQLKSGTASVVCLLNNFYPREAKVQWKVDNALQSGNSQESVTEQDSKDSTYSLSSTLTLSKADYEKHKVYACEVTHQGLSSPVTKSFNRGEC

SEQ ID NO: 1378 - protein, 453 aa, synthetic construct; identical to SEQ ID NO: 758
  source 1..453: note = XENP46491 Chain 1- STEAP-A[STEAP1]_H1.21_IgG1_PVA_/S267K

SEQ ID NO: 1379 - protein, 220 aa, synthetic construct
  source 1..220: note = XENP46491 Chain 2- STEAP-A[STEAP1]_L1.106_Light Chain
DIVMTQSPDSLAVSLGERATINCKSSQSLLYRSNQRNYLAWYQQKPGQPPKLLIYWASTRESGVPDRFSGSGSGTDFTLTISSLQAEDVAVYYCQQYYKYPRTFGGGTKVEIKRTVAAPSVFIFPPSDEQLKSGTASVVCLLNNFYPREAKVQWKVDNALQSGNSQESVTEQDSKDSTYSLSSTLTLSKADYEKHKVYACEVTHQGLSSPVTKSFNRGEC

SEQ ID NO: 1380 - protein, 453 aa, synthetic construct; identical to SEQ ID NO: 758
  source 1..453: note = XENP46492 Chain 1- STEAP-A[STEAP1]_H1.21_IgG1_PVA_/S267K

SEQ ID NO: 1381 - protein, 220 aa, synthetic construct
  source 1..220: note = XENP46492 Chain 2- STEAP-A[STEAP1]_L1.107_Light Chain
DIVMTQSPDSLAVSLGERATINCKSSQSLLYRSNQKNYLAWYQQKPGQPPKLLIYWALKRESGVPDRFSGSGSGTDFTLTISSLQAEDVAVYYCQQYYNYPRTFGGGTKVEIKRTVAAPSVFIFPPSDEQLKSGTASVVCLLNNFYPREAKVQWKVDNALQSGNSQESVTEQDSKDSTYSLSSTLTLSKADYEKHKVYACEVTHQGLSSPVTKSFNRGEC

SEQ ID NO: 1382 - protein, 453 aa, synthetic construct; identical to SEQ ID NO: 758
  source 1..453: note = XENP46493 Chain 1- STEAP-A[STEAP1]_H1.21_IgG1_PVA_/S267K

SEQ ID NO: 1383 - protein, 220 aa, synthetic construct
  source 1..220: note = XENP46493 Chain 2- STEAP-A[STEAP1]_L1.108_Light Chain
DIVMTQSPDSLAVSLGERATINCKSSQSLLYRSNQKNYLAWYQQKPGQPPKLLIYWALTRESGVPDRFSGSGSGTDFTLTISSLQAEDVAVYYCQQYYKYPRTFGGGTKVEIKRTVAAPSVFIFPPSDEQLKSGTASVVCLLNNFYPREAKVQWKVDNALQSGNSQESVTEQDSKDSTYSLSSTLTLSKADYEKHKVYACEVTHQGLSSPVTKSFNRGEC

SEQ ID NO: 1384 - protein, 453 aa, synthetic construct; identical to SEQ ID NO: 758
  source 1..453: note = XENP46494 Chain 1- STEAP-A[STEAP1]_H1.21_IgG1_PVA_/S267K

SEQ ID NO: 1385 - protein, 220 aa, synthetic construct
  source 1..220: note = XENP46494 Chain 2- STEAP-A[STEAP1]_L1.109_Light Chain
DIVMTQSPDSLAVSLGERATINCKSSQSLLYRSNQKNYLAWYQQKPGQPPKLLIYWAYKRESGVPDRFSGSGSGTDFTLTISSLQAEDVAVYYCQQYYNYPRTFGGGTKVEIKRTVAAPSVFIFPPSDEQLKSGTASVVCLLNNFYPREAKVQWKVDNALQSGNSQESVTEQDSKDSTYSLSSTLTLSKADYEKHKVYACEVTHQGLSSPVTKSFNRGEC

SEQ ID NO: 1386 - protein, 453 aa, synthetic construct; identical to SEQ ID NO: 758
  source 1..453: note = XENP46495 Chain 1- STEAP-A[STEAP1]_H1.21_IgG1_PVA_/S267K

SEQ ID NO: 1387 - protein, 220 aa, synthetic construct
  source 1..220: note = XENP46495 Chain 2- STEAP-A[STEAP1]_L1.110_Light Chain
DIVMTQSPDSLAVSLGERATINCKSSQSLLYRSNQKNYLAWYQQKPGQPPKLLIYWAYTRESGVPDRFSGSGSGTDFTLTISSLQAEDVAVYYCQQYYKYPRTFGGGTKVEIKRTVAAPSVFIFPPSDEQLKSGTASVVCLLNNFYPREAKVQWKVDNALQSGNSQESVTEQDSKDSTYSLSSTLTLSKADYEKHKVYACEVTHQGLSSPVTKSFNRGEC

SEQ ID NO: 1388 - protein, 453 aa, synthetic construct; identical to SEQ ID NO: 758
  source 1..453: note = XENP46496 Chain 1- STEAP-A[STEAP1]_H1.21_IgG1_PVA_/S267K

SEQ ID NO: 1389 - protein, 220 aa, synthetic construct
  source 1..220: note = XENP46496 Chain 2- STEAP-A[STEAP1]_L1.111_Light Chain
DIVMTQSPDSLAVSLGERATINCKSSQSLLYRSNQKNYLAWYQQKPGQPPKLLIYWASKRESGVPDRFSGSGSGTDFTLTISSLQAEDVAVYYCQQYYKYPRTFGGGTKVEIKRTVAAPSVFIFPPSDEQLKSGTASVVCLLNNFYPREAKVQWKVDNALQSGNSQESVTEQDSKDSTYSLSSTLTLSKADYEKHKVYACEVTHQGLSSPVTKSFNRGEC

SEQ ID NO: 1390 - protein, 453 aa, synthetic construct; identical to SEQ ID NO: 758
  source 1..453: note = XENP46497 Chain 1- STEAP-A[STEAP1]_H1.21_IgG1_PVA_/S267K

SEQ ID NO: 1391 - protein, 220 aa, synthetic construct
  source 1..220: note = XENP46497 Chain 2- STEAP-A[STEAP1]_L1.112_Light Chain
DIVMTQSPDSLAVSLGERATINCKSSQSLLYRSNQRNYLAWYQQKPGQPPKLLIYWALKRESGVPDRFSGSGSGTDFTLTISSLQAEDVAVYYCQQYYNYPRTFGGGTKVEIKRTVAAPSVFIFPPSDEQLKSGTASVVCLLNNFYPREAKVQWKVDNALQSGNSQESVTEQDSKDSTYSLSSTLTLSKADYEKHKVYACEVTHQGLSSPVTKSFNRGEC

SEQ ID NO: 1392 - protein, 453 aa, synthetic construct; identical to SEQ ID NO: 758
  source 1..453: note = XENP46498 Chain 1- STEAP-A[STEAP1]_H1.21_IgG1_PVA_/S267K

SEQ ID NO: 1393 - protein, 220 aa, synthetic construct
  source 1..220: note = XENP46498 Chain 2- STEAP-A[STEAP1]_L1.113_Light Chain
DIVMTQSPDSLAVSLGERATINCKSSQSLLYRSNQRNYLAWYQQKPGQPPKLLIYWAYKRESGVPDRFSGSGSGTDFTLTISSLQAEDVAVYYCQQYYNYPRTFGGGTKVEIKRTVAAPSVFIFPPSDEQLKSGTASVVCLLNNFYPREAKVQWKVDNALQSGNSQESVTEQDSKDSTYSLSSTLTLSKADYEKHKVYACEVTHQGLSSPVTKSFNRGEC

SEQ ID NO: 1394 - protein, 453 aa, synthetic construct; identical to SEQ ID NO: 758
  source 1..453: note = XENP46499 Chain 1- STEAP-A[STEAP1]_H1.21_IgG1_PVA_/S267K

SEQ ID NO: 1395 - protein, 220 aa, synthetic construct
  source 1..220: note = XENP46499 Chain 2- STEAP-A[STEAP1]_L1.114_Light Chain
DIVMTQSPDSLAVSLGERATINCKSSQTLLYRSNQKNYLAWYQQKPGQPPKLLIYWALTRESGVPDRFSGSGSGTDFTLTISSLQAEDVAVYYCQQYYKYPRTFGGGTKVEIKRTVAAPSVFIFPPSDEQLKSGTASVVCLLNNFYPREAKVQWKVDNALQSGNSQESVTEQDSKDSTYSLSSTLTLSKADYEKHKVYACEVTHQGLSSPVTKSFNRGEC

SEQ ID NO: 1396 - protein, 453 aa, synthetic construct; identical to SEQ ID NO: 758
  source 1..453: note = XENP46500 Chain 1- STEAP-A[STEAP1]_H1.21_IgG1_PVA_/S267K

SEQ ID NO: 1397 - protein, 220 aa, synthetic construct; identical to SEQ ID NO: 493
  source 1..220: note = XENP46500 Chain 2- STEAP-A[STEAP1]_L1.115_Light Chain

SEQ ID NO: 1398 - protein, 453 aa, synthetic construct; identical to SEQ ID NO: 758
  source 1..453: note = XENP46501 Chain 1- STEAP-A[STEAP1]_H1.21_IgG1_PVA_/S267K

SEQ ID NO: 1399 - protein, 220 aa, synthetic construct
  source 1..220: note = XENP46501 Chain 2- STEAP-A[STEAP1]_L1.116_Light Chain
DIVMTQSPDSLAVSLGERATINCKSSQTLLYRSNQKNYLAWYQQKPGQPPKLLIYWASKRESGVPDRFSGSGSGTDFTLTISSLQAEDVAVYYCQQYYKYPRTFGGGTKVEIKRTVAAPSVFIFPPSDEQLKSGTASVVCLLNNFYPREAKVQWKVDNALQSGNSQESVTEQDSKDSTYSLSSTLTLSKADYEKHKVYACEVTHQGLSSPVTKSFNRGEC

SEQ ID NO: 1400 - protein, 453 aa, synthetic construct; identical to SEQ ID NO: 758
  source 1..453: note = XENP46502 Chain 1- STEAP-A[STEAP1]_H1.21_IgG1_PVA_/S267K

SEQ ID NO: 1401 - protein, 220 aa, synthetic construct
  source 1..220: note = XENP46502 Chain 2- STEAP-A[STEAP1]_L1.117_Light Chain
DIVMTQSPDSLAVSLGERATINCKSSQSLLYRSNQRNYLAWYQQKPGQPPKLLIYWALTRESGVPDRFSGSGSGTDFTLTISSLQAEDVAVYYCQQYYKYPRTFGGGTKVEIKRTVAAPSVFIFPPSDEQLKSGTASVVCLLNNFYPREAKVQWKVDNALQSGNSQESVTEQDSKDSTYSLSSTLTLSKADYEKHKVYACEVTHQGLSSPVTKSFNRGEC

SEQ ID NO: 1402 - protein, 453 aa, synthetic construct; identical to SEQ ID NO: 758
  source 1..453: note = XENP46503 Chain 1- STEAP-A[STEAP1]_H1.21_IgG1_PVA_/S267K

SEQ ID NO: 1403 - protein, 220 aa, synthetic construct
  source 1..220: note = XENP46503 Chain 2- STEAP-A[STEAP1]_L1.118_Light Chain
DIVMTQSPDSLAVSLGERATINCKSSQSLLYRSNQRNYLAWYQQKPGQPPKLLIYWAYTRESGVPDRFSGSGSGTDFTLTISSLQAEDVAVYYCQQYYKYPRTFGGGTKVEIKRTVAAPSVFIFPPSDEQLKSGTASVVCLLNNFYPREAKVQWKVDNALQSGNSQESVTEQDSKDSTYSLSSTLTLSKADYEKHKVYACEVTHQGLSSPVTKSFNRGEC

SEQ ID NO: 1404 - protein, 453 aa, synthetic construct; identical to SEQ ID NO: 758
  source 1..453: note = XENP46504 Chain 1- STEAP-A[STEAP1]_H1.21_IgG1_PVA_/S267K

SEQ ID NO: 1405 - protein, 220 aa, synthetic construct
  source 1..220: note = XENP46504 Chain 2- STEAP-A[STEAP1]_L1.119_Light Chain
DIVMTQSPDSLAVSLGERATINCKSSQSLLYRSNQRNYLAWYQQKPGQPPKLLIYWASKRESGVPDRFSGSGSGTDFTLTISSLQAEDVAVYYCQQYYKYPRTFGGGTKVEIKRTVAAPSVFIFPPSDEQLKSGTASVVCLLNNFYPREAKVQWKVDNALQSGNSQESVTEQDSKDSTYSLSSTLTLSKADYEKHKVYACEVTHQGLSSPVTKSFNRGEC

SEQ ID NO: 1406 - protein, 453 aa, synthetic construct; identical to SEQ ID NO: 1282
  source 1..453: note = XENP46505 Chain 1- STEAP-A[STEAP1]_H1.195_IgG1_PVA_/S267K

SEQ ID NO: 1407 - protein, 220 aa, synthetic construct; identical to SEQ ID NO: 1351
  source 1..220: note = XENP46505 Chain 2- STEAP-A[STEAP1]_L1.92_Light Chain

SEQ ID NO: 1408 - protein, 453 aa, synthetic construct; identical to SEQ ID NO: 1282
  source 1..453: note = XENP46506 Chain 1- STEAP-A[STEAP1]_H1.195_IgG1_PVA_/S267K

SEQ ID NO: 1409 - protein, 220 aa, synthetic construct; identical to SEQ ID NO: 1355
  source 1..220: note = XENP46506 Chain 2- STEAP-A[STEAP1]_L1.94_Light Chain

SEQ ID NO: 1410 - protein, 453 aa, synthetic construct; identical to SEQ ID NO: 1282
  source 1..453: note = XENP46507 Chain 1- STEAP-A[STEAP1]_H1.195_IgG1_PVA_/S267K

SEQ ID NO: 1411 - protein, 220 aa, synthetic construct; identical to SEQ ID NO: 1357
  source 1..220: note = XENP46507 Chain 2- STEAP-A[STEAP1]_L1.95_Light Chain

SEQ ID NO: 1412 - protein, 453 aa, synthetic construct; identical to SEQ ID NO: 1282
  source 1..453: note = XENP46508 Chain 1- STEAP-A[STEAP1]_H1.195_IgG1_PVA_/S267K

SEQ ID NO: 1413 - protein, 220 aa, synthetic construct; identical to SEQ ID NO: 1375
  source 1..220: note = XENP46508 Chain 2- STEAP-A[STEAP1]_L1.104_Light Chain

SEQ ID NO: 1414 - protein, 453 aa, synthetic construct; identical to SEQ ID NO: 1282
  source 1..453: note = XENP46509 Chain 1- STEAP-A[STEAP1]_H1.195_IgG1_PVA_/S267K

SEQ ID NO: 1415 - protein, 220 aa, synthetic construct; identical to SEQ ID NO: 1377
  source 1..220: note = XENP46509 Chain 2- STEAP-A[STEAP1]_L1.105_Light Chain

SEQ ID NO: 1416 - protein, 453 aa, synthetic construct; identical to SEQ ID NO: 1282
  source 1..453: note = XENP46510 Chain 1- STEAP-A[STEAP1]_H1.195_IgG1_PVA_/S267K

SEQ ID NO: 1417 - protein, 220 aa, synthetic construct; identical to SEQ ID NO: 1385
  source 1..220: note = XENP46510 Chain 2- STEAP-A[STEAP1]_L1.109_Light Chain

SEQ ID NO: 1418 - protein, 453 aa, synthetic construct; identical to SEQ ID NO: 1284
  source 1..453: note = XENP46511 Chain 1- STEAP-A[STEAP1]_H1.196_IgG1_PVA_/S267K

SEQ ID NO: 1419 - protein, 220 aa, synthetic construct; identical to SEQ ID NO: 1351
  source 1..220: note = XENP46511 Chain 2- STEAP-A[STEAP1]_L1.92_Light Chain

SEQ ID NO: 1420 - protein, 453 aa, synthetic construct; identical to SEQ ID NO: 1284
  source 1..453: note = XENP46512 Chain 1- STEAP-A[STEAP1]_H1.196_IgG1_PVA_/S267K

SEQ ID NO: 1421 - protein, 220 aa, synthetic construct; identical to SEQ ID NO: 1355
  source 1..220: note = XENP46512 Chain 2- STEAP-A[STEAP1]_L1.94_Light Chain

SEQ ID NO: 1422 - protein, 453 aa, synthetic construct; identical to SEQ ID NO: 1284
  source 1..453: note = XENP46513 Chain 1- STEAP-A[STEAP1]_H1.196_IgG1_PVA_/S267K

SEQ ID NO: 1423 - protein, 220 aa, synthetic construct; identical to SEQ ID NO: 1357
  source 1..220: note = XENP46513 Chain 2- STEAP-A[STEAP1]_L1.95_Light Chain

SEQ ID NO: 1424 - protein, 453 aa, synthetic construct; identical to SEQ ID NO: 1284
  source 1..453: note = XENP46514 Chain 1- STEAP-A[STEAP1]_H1.196_IgG1_PVA_/S267K

SEQ ID NO: 1425 - protein, 220 aa, synthetic construct; identical to SEQ ID NO: 1375
  source 1..220: note = XENP46514 Chain 2- STEAP-A[STEAP1]_L1.104_Light Chain

SEQ ID NO: 1426 - protein, 453 aa, synthetic construct; identical to SEQ ID NO: 1284
  source 1..453: note = XENP46515 Chain 1- STEAP-A[STEAP1]_H1.196_IgG1_PVA_/S267K

SEQ ID NO: 1427 - protein, 220 aa, synthetic construct; identical to SEQ ID NO: 1377
  source 1..220: note = XENP46515 Chain 2- STEAP-A[STEAP1]_L1.105_Light Chain

SEQ ID NO: 1428 - protein, 453 aa, synthetic construct; identical to SEQ ID NO: 1284
  source 1..453: note = XENP46516 Chain 1- STEAP-A[STEAP1]_H1.196_IgG1_PVA_/S267K

SEQ ID NO: 1429 - protein, 220 aa, synthetic construct; identical to SEQ ID NO: 1385
  source 1..220: note = XENP46516 Chain 2- STEAP-A[STEAP1]_L1.109_Light Chain

SEQ ID NO: 1430 - protein, 453 aa, synthetic construct; identical to SEQ ID NO: 1302
  source 1..453: note = XENP46517 Chain 1- STEAP-A[STEAP1]_H1.205_IgG1_PVA_/S267K

SEQ ID NO: 1431 - protein, 220 aa, synthetic construct; identical to SEQ ID NO: 1351
  source 1..220: note = XENP46517 Chain 2- STEAP-A[STEAP1]_L1.92_Light Chain

SEQ ID NO: 1432 - protein, 453 aa, synthetic construct; identical to SEQ ID NO: 1302
  source 1..453: note = XENP46518 Chain 1- STEAP-A[STEAP1]_H1.205_IgG1_PVA_/S267K

SEQ ID NO: 1433 - protein, 220 aa, synthetic construct; identical to SEQ ID NO: 1355
  source 1..220: note = XENP46518 Chain 2- STEAP-A[STEAP1]_L1.94_Light Chain

SEQ ID NO: 1434 - protein, 453 aa, synthetic construct; identical to SEQ ID NO: 1302
  source 1..453: note = XENP46519 Chain 1- STEAP-A[STEAP1]_H1.205_IgG1_PVA_/S267K

SEQ ID NO: 1435 - protein, 220 aa, synthetic construct; identical to SEQ ID NO: 1357
  source 1..220: note = XENP46519 Chain 2- STEAP-A[STEAP1]_L1.95_Light Chain

SEQ ID NO: 1436 - protein, 453 aa, synthetic construct; identical to SEQ ID NO: 1302
  source 1..453: note = XENP46520 Chain 1- STEAP-A[STEAP1]_H1.205_IgG1_PVA_/S267K

SEQ ID NO: 1437 - protein, 220 aa, synthetic construct; identical to SEQ ID NO: 1375
  source 1..220: note = XENP46520 Chain 2- STEAP-A[STEAP1]_L1.104_Light Chain

SEQ ID NO: 1438 - protein, 453 aa, synthetic construct; identical to SEQ ID NO: 1302
  source 1..453: note = XENP46521 Chain 1- STEAP-A[STEAP1]_H1.205_IgG1_PVA_/S267K

SEQ ID NO: 1439 - protein, 220 aa, synthetic construct; identical to SEQ ID NO: 1377
  source 1..220: note = XENP46521 Chain 2- STEAP-A[STEAP1]_L1.105_Light Chain

SEQ ID NO: 1440 - protein, 453 aa, synthetic construct; identical to SEQ ID NO: 1302
  source 1..453: note = XENP46522 Chain 1- STEAP-A[STEAP1]_H1.205_IgG1_PVA_/S267K

SEQ ID NO: 1441 - protein, 220 aa, synthetic construct; identical to SEQ ID NO: 1385
  source 1..220: note = XENP46522 Chain 2- STEAP-A[STEAP1]_L1.109_Light Chain

SEQ ID NO: 1442 - protein, 453 aa, synthetic construct
  source 1..453: note = XENP46523 Chain 1- STEAP-A[STEAP1]_H1.193_IgG1_PVA_/S267K
QVQVQESGPGLVKPSQTLSLTCTVSGYSITSDYAWNWIRQPPGKKLEWIGYISNSGETSYNPSLKSRVTISRDTSKNQFSLKLSSVTAADTAVYYCARERNYDYELYYYAMDYWGQGTLVTVSSASTKGPSVFPLAPSSKSTSGGTAALGCLVKDYFPEPVTVSWNSGALTSGVHTFPAVLQSSGLYSLSSVVTVPSSSLGTQTYICNVNHKPSNTKVDKKVEPKSCDKTHTCPPCPAPPVAGPSVFLFPPKPKDTLMISRTPEVTCVVVDVKHEDPEVKFNWYVDGVEVHNAKTKPREEQYNSTYRVVSVLTVLHQDWLNGKEYKCKVSNKALPAPIEKTISKAKGQPREPQVYTLPPSREEMTKNQVSLTCLVKGFYPSDIAVEWESNGQPENNYKTTPPVLDSDGSFFLYSKLTVDKSRWQQGNVFSCSVMHEALHNHYTQKSLSLSPGK

SEQ ID NO: 1443 - protein, 220 aa, synthetic construct
  source 1..220: note = XENP46523 Chain 2- STEAP-A[STEAP1]_L1.91_Light Chain
DIVMTQSPDSLAVSLGERATINCKSSKSLLYRSNQKNYLAWYQQKPGQPPKLLIYWASTRESGVPDRFSGSGSGTDFTLTISSLQAEDVAVYYCQQYYNYPRTFGGGTKVEIKRTVAAPSVFIFPPSDEQLKSGTASVVCLLNNFYPREAKVQWKVDNALQSGNSQESVTEQDSKDSTYSLSSTLTLSKADYEKHKVYACEVTHQGLSSPVTKSFNRGEC

SEQ ID NO: 1444 - protein, 453 aa, synthetic construct
  source 1..453: note = XENP46524 Chain 1- STEAP-A[STEAP1]_H1.194_IgG1_PVA_/S267K
QVQVQESGPGLVKPSQTLSLTCTVSGYSITSDYAWNWIRQPPGKKLEWIGYISNSGSTSYNPSLKSRVTIRRDTSKNQFSLKLSSVTAADTAVYYCARERNYDYELYYYAMDYWGQGTLVTVSSASTKGPSVFPLAPSSKSTSGGTAALGCLVKDYFPEPVTVSWNSGALTSGVHTFPAVLQSSGLYSLSSVVTVPSSSLGTQTYICNVNHKPSNTKVDKKVEPKSCDKTHTCPPCPAPPVAGPSVFLFPPKPKDTLMISRTPEVTCVVVDVKHEDPEVKFNWYVDGVEVHNAKTKPREEQYNSTYRVVSVLTVLHQDWLNGKEYKCKVSNKALPAPIEKTISKAKGQPREPQVYTLPPSREEMTKNQVSLTCLVKGFYPSDIAVEWESNGQPENNYKTTPPVLDSDGSFFLYSKLTVDKSRWQQGNVFSCSVMHEALHNHYTQKSLSLSPGK

SEQ ID NO: 1445 - protein, 220 aa, synthetic construct
  source 1..220: note = XENP46524 Chain 2- STEAP-A[STEAP1]_L1.86_Light Chain
DIDMTQSPDSLAVSLGERATINCKSSQSLLYRSNQKNYLAWYQQKPGQPPKLLIYWASTRESGVPDRFSGSGSGTDFTLTISSLQAEDVAVYYCQQYYNYPRTFGGGTKVEIKRTVAAPSVFIFPPSDEQLKSGTASVVCLLNNFYPREAKVQWKVDNALQSGNSQESVTEQDSKDSTYSLSSTLTLSKADYEKHKVYACEVTHQGLSSPVTKSFNRGEC

SEQ ID NO: 1446 - protein, 453 aa, synthetic construct; identical to SEQ ID NO: 1444
  source 1..453: note = XENP46525 Chain 1- STEAP-A[STEAP1]_H1.194_IgG1_PVA_/S267K

SEQ ID NO: 1447 - protein, 220 aa, synthetic construct
  source 1..220: note = XENP46525 Chain 2- STEAP-A[STEAP1]_L1.87_Light Chain
DIVMTQSPDSLAVSLGERATINCKSDQSLLYRSNQKNYLAWYQQKPGQPPKLLIYWASTRESGVPDRFSGSGSGTDFTLTISSLQAEDVAVYYCQQYYNYPRTFGGGTKVEIKRTVAAPSVFIFPPSDEQLKSGTASVVCLLNNFYPREAKVQWKVDNALQSGNSQESVTEQDSKDSTYSLSSTLTLSKADYEKHKVYACEVTHQGLSSPVTKSFNRGEC

SEQ ID NO: 1448 - protein, 453 aa, synthetic construct; identical to SEQ ID NO: 1444
  source 1..453: note = XENP46526 Chain 1- STEAP-A[STEAP1]_H1.194_IgG1_PVA_/S267K

SEQ ID NO: 1449 - protein, 220 aa, synthetic construct
  source 1..220: note = XENP46526 Chain 2- STEAP-A[STEAP1]_L1.88_Light Chain
DIVMTQSPDSLAVSLGERATINCKSEQSLLYRSNQKNYLAWYQQKPGQPPKLLIYWASTRESGVPDRFSGSGSGTDFTLTISSLQAEDVAVYYCQQYYNYPRTFGGGTKVEIKRTVAAPSVFIFPPSDEQLKSGTASVVCLLNNFYPREAKVQWKVDNALQSGNSQESVTEQDSKDSTYSLSSTLTLSKADYEKHKVYACEVTHQGLSSPVTKSFNRGEC

SEQ ID NO: 1450 - protein, 453 aa, synthetic construct; identical to SEQ ID NO: 1444
  source 1..453: note = XENP46527 Chain 1- STEAP-A[STEAP1]_H1.194_IgG1_PVA_/S267K

SEQ ID NO: 1451 - protein, 220 aa, synthetic construct
  source 1..220: note = XENP46527 Chain 2- STEAP-A[STEAP1]_L1.89_Light Chain
DIVMTQSPDSLAVSLGERATINCKSSDSLLYRSNQKNYLAWYQQKPGQPPKLLIYWASTRESGVPDRFSGSGSGTDFTLTISSLQAEDVAVYYCQQYYNYPRTFGGGTKVEIKRTVAAPSVFIFPPSDEQLKSGTASVVCLLNNFYPREAKVQWKVDNALQSGNSQESVTEQDSKDSTYSLSSTLTLSKADYEKHKVYACEVTHQGLSSPVTKSFNRGEC

SEQ ID NO: 1452 - protein, 453 aa, synthetic construct; identical to SEQ ID NO: 1444
  source 1..453: note = XENP46528 Chain 1- STEAP-A[STEAP1]_H1.194_IgG1_PVA_/S267K

SEQ ID NO: 1453 - protein, 220 aa, synthetic construct
  source 1..220: note = XENP46528 Chain 2- STEAP-A[STEAP1]_L1.90_Light Chain
DIVMTQSPDSLAVSLGERATINCKSSESLLYRSNQKNYLAWYQQKPGQPPKLLIYWASTRESGVPDRFSGSGSGTDFTLTISSLQAEDVAVYYCQQYYNYPRTFGGGTKVEIKRTVAAPSVFIFPPSDEQLKSGTASVVCLLNNFYPREAKVQWKVDNALQSGNSQESVTEQDSKDSTYSLSSTLTLSKADYEKHKVYACEVTHQGLSSPVTKSFNRGEC

SEQ ID NO: 1454 - protein, 453 aa, synthetic construct; identical to SEQ ID NO: 1348
  source 1..453: note = XENP46889 Chain 1-  STEAP-A[STEAP1]_H1.228_IgG1_PVA_/ S267K

SEQ ID NO: 1455 - protein, 220 aa, synthetic construct; identical to SEQ ID NO: 493
  source 1..220: note = XENP46889 Chain 2-  STEAP-A[STEAP1]_L1.115_Light Chain

SEQ ID NO: 1456 - protein, 453 aa, synthetic construct
  source 1..453: note = XENP46890 Chain 1-  STEAP-A[STEAP1]_H1.229_IgG1_PVA_/ S267K
QVQVQESGPGLVKPSQTLSLTCTVSGYSITSDYSWNWIRQPPGKKLEWIGYIGESGSTVYNPSLKSRVTISRDTSKNQFSLKLSSVTAADTAVYYCARERNYDYELYYYAMDYWGQGTLVTVSSASTKGPSVFPLAPSSKSTSGGTAALGCLVKDYFPEPVTVSWNSGALTSGVHTFPAVLQSSGLYSLSSVVTVPSSSLGTQTYICNVNHKPSNTKVDKKVEPKSCDKTHTCPPCPAPPVAGPSVFLFPPKPKDTLMISRTPEVTCVVVDVKHEDPEVKFNWYVDGVEVHNAKTKPREEQYNSTYRVVSVLTVLHQDWLNGKEYKCKVSNKALPAPIEKTISKAKGQPREPQVYTLPPSREEMTKNQVSLTCLVKGFYPSDIAVEWESNGQPENNYKTTPPVLDSDGSFFLYSKLTVDKSRWQQGNVFSCSVMHEALHNHYTQKSLSLSPGK

SEQ ID NO: 1457 - protein, 220 aa, synthetic construct; identical to SEQ ID NO: 493
  source 1..220: note = XENP46890 Chain 2-  STEAP-A[STEAP1]_L1.115_Light Chain

SEQ ID NO: 1458 - protein, 453 aa, synthetic construct
  source 1..453: note = XENP46891 Chain 1-  STEAP-A[STEAP1]_H1.230_IgG1_PVA_/ S267K
QVQVQESGPGLVKPSQTLSLTCTVSGYSITSDYSWNWIRQPPGKKLEWIGYIGTSGSTVYNPSLKSRVTISRDTSKNQFSLKLSSVTAADTAVYYCARERNYDYELYYYAMDYWGQGTLVTVSSASTKGPSVFPLAPSSKSTSGGTAALGCLVKDYFPEPVTVSWNSGALTSGVHTFPAVLQSSGLYSLSSVVTVPSSSLGTQTYICNVNHKPSNTKVDKKVEPKSCDKTHTCPPCPAPPVAGPSVFLFPPKPKDTLMISRTPEVTCVVVDVKHEDPEVKFNWYVDGVEVHNAKTKPREEQYNSTYRVVSVLTVLHQDWLNGKEYKCKVSNKALPAPIEKTISKAKGQPREPQVYTLPPSREEMTKNQVSLTCLVKGFYPSDIAVEWESNGQPENNYKTTPPVLDSDGSFFLYSKLTVDKSRWQQGNVFSCSVMHEALHNHYTQKSLSLSPGK

SEQ ID NO: 1459 - protein, 220 aa, synthetic construct; identical to SEQ ID NO: 493
  source 1..220: note = XENP46891 Chain 2-  STEAP-A[STEAP1]_L1.115_Light Chain

SEQ ID NO: 1460 - protein, 453 aa, synthetic construct
  source 1..453: note = XENP46892 Chain 1-  STEAP-A[STEAP1]_H1.231_IgG1_PVA_/ S267K
QVQVQESGPGLVKPSQTLSLTCTVSGYSITSDYSWNWIRQPPGKKLEWIGYIGNQGSTVYNPSLKSRVTISRDTSKNQFSLKLSSVTAADTAVYYCARERNYDYELYYYAMDYWGQGTLVTVSSASTKGPSVFPLAPSSKSTSGGTAALGCLVKDYFPEPVTVSWNSGALTSGVHTFPAVLQSSGLYSLSSVVTVPSSSLGTQTYICNVNHKPSNTKVDKKVEPKSCDKTHTCPPCPAPPVAGPSVFLFPPKPKDTLMISRTPEVTCVVVDVKHEDPEVKFNWYVDGVEVHNAKTKPREEQYNSTYRVVSVLTVLHQDWLNGKEYKCKVSNKALPAPIEKTISKAKGQPREPQVYTLPPSREEMTKNQVSLTCLVKGFYPSDIAVEWESNGQPENNYKTTPPVLDSDGSFFLYSKLTVDKSRWQQGNVFSCSVMHEALHNHYTQKSLSLSPGK

SEQ ID NO: 1461 - protein, 220 aa, synthetic construct; identical to SEQ ID NO: 493
  source 1..220: note = XENP46892 Chain 2-  STEAP-A[STEAP1]_L1.115_Light Chain

SEQ ID NO: 1462 - protein, 453 aa, synthetic construct
  source 1..453: note = XENP46893 Chain 1-  STEAP-A[STEAP1]_H1.232_IgG1_PVA_/ S267K
QVQVQESGPGLVKPSQTLSLTCTVSGYSITSDYSWNWIRQPPGKKLEWIGYIGNTGSTVYNPSLKSRVTISRDTSKNQFSLKLSSVTAADTAVYYCARERNYDYELYYYAMDYWGQGTLVTVSSASTKGPSVFPLAPSSKSTSGGTAALGCLVKDYFPEPVTVSWNSGALTSGVHTFPAVLQSSGLYSLSSVVTVPSSSLGTQTYICNVNHKPSNTKVDKKVEPKSCDKTHTCPPCPAPPVAGPSVFLFPPKPKDTLMISRTPEVTCVVVDVKHEDPEVKFNWYVDGVEVHNAKTKPREEQYNSTYRVVSVLTVLHQDWLNGKEYKCKVSNKALPAPIEKTISKAKGQPREPQVYTLPPSREEMTKNQVSLTCLVKGFYPSDIAVEWESNGQPENNYKTTPPVLDSDGSFFLYSKLTVDKSRWQQGNVFSCSVMHEALHNHYTQKSLSLSPGK

SEQ ID NO: 1463 - protein, 220 aa, synthetic construct; identical to SEQ ID NO: 493
  source 1..220: note = XENP46893 Chain 2-  STEAP-A[STEAP1]_L1.115_Light Chain

SEQ ID NO: 1464 - protein, 453 aa, synthetic construct; identical to SEQ ID NO: 1458
  source 1..453: note = XENP47373 Chain 1-  STEAP-A[STEAP1]_H1.230_IgG1_PVA_/ S267K

SEQ ID NO: 1465 - protein, 220 aa, synthetic construct; identical to SEQ ID NO: 514
  source 1..220: note = XENP47373 Chain 2-  STEAP-A[STEAP1]_L1.100_Light Chain

SEQ ID NO: 1466 - protein, 124 aa, synthetic construct; identical to SEQ ID NO: 471
  source 1..124: note = STEAP-A[STEAP1]_H1

SEQ ID NO: 1467 - protein, 124 aa, synthetic construct
  source 1..124: note = STEAP-A[STEAP1]_H1.1
QVQLQESGPGLVKPSQTLSLTCTVSGYSITSDYAWNWIRQPPGKKLEWIGYISNSGSTSYNPSLKSRVTISRDTSKNQFSLKLSSVTAADTAVYYCARERNYDYDDYYYAMDYWGQGTLVTVSS

SEQ ID NO: 1468 - protein, 124 aa, synthetic construct
  source 1..124: note = STEAP-A[STEAP1]_H1.2
QVQVQESGPGLVKPSQTLSLTCTVSGYSITSDYAWNWIRQPPGKGLEWIGYISNSGSTSYNPSLKSRVTISRDTSKNQFSLKLSSVTAADTAVYYCARERNYDYDDYYYAMDYWGQGTLVTVSS

SEQ ID NO: 1469 - protein, 124 aa, synthetic construct
  source 1..124: note = STEAP-A[STEAP1]_H1.3
QVQLQESGPGLVKPSQTLSLTCTVSGYSITSDYAWNWIRQPPGKGLEWIGYISNSGSTSYNPSLKSRVTISRDTSKNQFSLKLSSVTAADTAVYYCARERNYDYDDYYYAMDYWGQGTLVTVSS

SEQ ID NO: 1470 - protein, 124 aa, synthetic construct
  source 1..124: note = STEAP-A[STEAP1]_H1.4
QVQVQESGPGLVKPSQTLSLTCTVSGYSITSDYAWNWIRQPPGKKLEWIGYISNSGSTSYNPSLKSRVTISRDTSKNQFSLKLSSVTAADTAVYYCARERNYDYADYYYAMDYWGQGTLVTVSS

SEQ ID NO: 1471 - protein, 124 aa, synthetic construct
  source 1..124: note = STEAP-A[STEAP1]_H1.5
QVQVQESGPGLVKPSQTLSLTCTVSGYSITSDYAWNWIRQPPGKKLEWIGYISNSGSTSYNPSLKSRVTISRDTSKNQFSLKLSSVTAADTAVYYCARERNYDYEDYYYAMDYWGQGTLVTVSS

SEQ ID NO: 1472 - protein, 124 aa, synthetic construct
  source 1..124: note = STEAP-A[STEAP1]_H1.6
QVQVQESGPGLVKPSQTLSLTCTVSGYSITSDYAWNWIRQPPGKKLEWIGYISNSGSTSYNPSLKSRVTISRDTSKNQFSLKLSSVTAADTAVYYCARERNYDYLDYYYAMDYWGQGTLVTVSS

SEQ ID NO: 1473 - protein, 124 aa, synthetic construct
  source 1..124: note = STEAP-A[STEAP1]_H1.7
QVQVQESGPGLVKPSQTLSLTCTVSGYSITSDYAWNWIRQPPGKKLEWIGYISNSGSTSYNPSLKSRVTISRDTSKNQFSLKLSSVTAADTAVYYCARERNYDYQDYYYAMDYWGQGTLVTVSS

SEQ ID NO: 1474 - protein, 124 aa, synthetic construct
  source 1..124: note = STEAP-A[STEAP1]_H1.8
QVQVQESGPGLVKPSQTLSLTCTVSGYSITSDYAWNWIRQPPGKKLEWIGYISNSGSTSYNPSLKSRVTISRDTSKNQFSLKLSSVTAADTAVYYCARERNYDYTDYYYAMDYWGQGTLVTVSS

SEQ ID NO: 1475 - protein, 124 aa, synthetic construct
  source 1..124: note = STEAP-A[STEAP1]_H1.9
QVQVQESGPGLVKPSQTLSLTCTVSGYSITSDYAWNWIRQPPGKKLEWIGYISNSGSTSYNPSLKSRVTISRDTSKNQFSLKLSSVTAADTAVYYCARERNYDYDAYYYAMDYWGQGTLVTVSS

SEQ ID NO: 1476 - protein, 124 aa, synthetic construct
  source 1..124: note = STEAP-A[STEAP1]_H1.10
QVQVQESGPGLVKPSQTLSLTCTVSGYSITSDYAWNWIRQPPGKKLEWIGYISNSGSTSYNPSLKSRVTISRDTSKNQFSLKLSSVTAADTAVYYCARERNYDYDEYYYAMDYWGQGTLVTVSS

SEQ ID NO: 1477 - protein, 124 aa, synthetic construct
  source 1..124: note = STEAP-A[STEAP1]_H1.11
QVQVQESGPGLVKPSQTLSLTCTVSGYSITSDYAWNWIRQPPGKKLEWIGYISNSGSTSYNPSLKSRVTISRDTSKNQFSLKLSSVTAADTAVYYCARERNYDYDLYYYAMDYWGQGTLVTVSS

SEQ ID NO: 1478 - protein, 124 aa, synthetic construct
  source 1..124: note = STEAP-A[STEAP1]_H1.12
QVQVQESGPGLVKPSQTLSLTCTVSGYSITSDYAWNWIRQPPGKKLEWIGYISNSGSTSYNPSLKSRVTISRDTSKNQFSLKLSSVTAADTAVYYCARERNYDYDQYYYAMDYWGQGTLVTVSS

SEQ ID NO: 1479 - protein, 124 aa, synthetic construct
  source 1..124: note = STEAP-A[STEAP1]_H1.13
QVQVQESGPGLVKPSQTLSLTCTVSGYSITSDYAWNWIRQPPGKKLEWIGYISNSGSTSYNPSLKSRVTISRDTSKNQFSLKLSSVTAADTAVYYCARERNYDYDTYYYAMDYWGQGTLVTVSS

SEQ ID NO: 1480 - protein, 124 aa, synthetic construct
  source 1..124: note = STEAP-A[STEAP1]_H1.14
QVQVQESGPGLVKPSQTLSLTCTVSGYSITSDYAWNWIRQPPGKKLEWIGYISNSGSTSYNPSLKSRVTISRDTSKNQFSLKLSSVTAADTAVYYCARERNYDYAAYYYAMDYWGQGTLVTVSS

SEQ ID NO: 1481 - protein, 124 aa, synthetic construct
  source 1..124: note = STEAP-A[STEAP1]_H1.15
QVQVQESGPGLVKPSQTLSLTCTVSGYSITSDYAWNWIRQPPGKKLEWIGYISNSGSTSYNPSLKSRVTISRDTSKNQFSLKLSSVTAADTAVYYCARERNYDYAEYYYAMDYWGQGTLVTVSS

SEQ ID NO: 1482 - protein, 124 aa, synthetic construct
  source 1..124: note = STEAP-A[STEAP1]_H1.16
QVQVQESGPGLVKPSQTLSLTCTVSGYSITSDYAWNWIRQPPGKKLEWIGYISNSGSTSYNPSLKSRVTISRDTSKNQFSLKLSSVTAADTAVYYCARERNYDYALYYYAMDYWGQGTLVTVSS

SEQ ID NO: 1483 - protein, 124 aa, synthetic construct
  source 1..124: note = STEAP-A[STEAP1]_H1.17
QVQVQESGPGLVKPSQTLSLTCTVSGYSITSDYAWNWIRQPPGKKLEWIGYISNSGSTSYNPSLKSRVTISRDTSKNQFSLKLSSVTAADTAVYYCARERNYDYAQYYYAMDYWGQGTLVTVSS

SEQ ID NO: 1484 - protein, 124 aa, synthetic construct
  source 1..124: note = STEAP-A[STEAP1]_H1.18
QVQVQESGPGLVKPSQTLSLTCTVSGYSITSDYAWNWIRQPPGKKLEWIGYISNSGSTSYNPSLKSRVTISRDTSKNQFSLKLSSVTAADTAVYYCARERNYDYATYYYAMDYWGQGTLVTVSS

SEQ ID NO: 1485 - protein, 124 aa, synthetic construct
  source 1..124: note = STEAP-A[STEAP1]_H1.19
QVQVQESGPGLVKPSQTLSLTCTVSGYSITSDYAWNWIRQPPGKKLEWIGYISNSGSTSYNPSLKSRVTISRDTSKNQFSLKLSSVTAADTAVYYCARERNYDYEAYYYAMDYWGQGTLVTVSS

SEQ ID NO: 1486 - protein, 124 aa, synthetic construct
  source 1..124: note = STEAP-A[STEAP1]_H1.20
QVQVQESGPGLVKPSQTLSLTCTVSGYSITSDYAWNWIRQPPGKKLEWIGYISNSGSTSYNPSLKSRVTISRDTSKNQFSLKLSSVTAADTAVYYCARERNYDYEEYYYAMDYWGQGTLVTVSS

SEQ ID NO: 1487 - protein, 124 aa, synthetic construct
  source 1..124: note = STEAP-A[STEAP1]_H1.21
QVQVQESGPGLVKPSQTLSLTCTVSGYSITSDYAWNWIRQPPGKKLEWIGYISNSGSTSYNPSLKSRVTISRDTSKNQFSLKLSSVTAADTAVYYCARERNYDYELYYYAMDYWGQGTLVTVSS

SEQ ID NO: 1488 - protein, 124 aa, synthetic construct
  source 1..124: note = STEAP-A[STEAP1]_H1.22
QVQVQESGPGLVKPSQTLSLTCTVSGYSITSDYAWNWIRQPPGKKLEWIGYISNSGSTSYNPSLKSRVTISRDTSKNQFSLKLSSVTAADTAVYYCARERNYDYEQYYYAMDYWGQGTLVTVSS

SEQ ID NO: 1489 - protein, 124 aa, synthetic construct
  source 1..124: note = STEAP-A[STEAP1]_H1.23
QVQVQESGPGLVKPSQTLSLTCTVSGYSITSDYAWNWIRQPPGKKLEWIGYISNSGSTSYNPSLKSRVTISRDTSKNQFSLKLSSVTAADTAVYYCARERNYDYETYYYAMDYWGQGTLVTVSS

SEQ ID NO: 1490 - protein, 124 aa, synthetic construct
  source 1..124: note = STEAP-A[STEAP1]_H1.24
QVQVQESGPGLVKPSQTLSLTCTVSGYSITSDYAWNWIRQPPGKKLEWIGYISNSGSTSYNPSLKSRVTISRDTSKNQFSLKLSSVTAADTAVYYCARERNYDYLAYYYAMDYWGQGTLVTVSS

SEQ ID NO: 1491 - protein, 124 aa, synthetic construct
  source 1..124: note = STEAP-A[STEAP1]_H1.25
QVQVQESGPGLVKPSQTLSLTCTVSGYSITSDYAWNWIRQPPGKKLEWIGYISNSGSTSYNPSLKSRVTISRDTSKNQFSLKLSSVTAADTAVYYCARERNYDYLEYYYAMDYWGQGTLVTVSS

SEQ ID NO: 1492 - protein, 124 aa, synthetic construct
  source 1..124: note = STEAP-A[STEAP1]_H1.26
QVQVQESGPGLVKPSQTLSLTCTVSGYSITSDYAWNWIRQPPGKKLEWIGYISNSGSTSYNPSLKSRVTISRDTSKNQFSLKLSSVTAADTAVYYCARERNYDYLLYYYAMDYWGQGTLVTVSS

SEQ ID NO: 1493 - protein, 124 aa, synthetic construct
  source 1..124: note = STEAP-A[STEAP1]_H1.27
QVQVQESGPGLVKPSQTLSLTCTVSGYSITSDYAWNWIRQPPGKKLEWIGYISNSGSTSYNPSLKSRVTISRDTSKNQFSLKLSSVTAADTAVYYCARERNYDYLQYYYAMDYWGQGTLVTVSS

SEQ ID NO: 1494 - protein, 124 aa, synthetic construct
  source 1..124: note = STEAP-A[STEAP1]_H1.28
QVQVQESGPGLVKPSQTLSLTCTVSGYSITSDYAWNWIRQPPGKKLEWIGYISNSGSTSYNPSLKSRVTISRDTSKNQFSLKLSSVTAADTAVYYCARERNYDYLTYYYAMDYWGQGTLVTVSS

SEQ ID NO: 1495 - protein, 124 aa, synthetic construct
  source 1..124: note = STEAP-A[STEAP1]_H1.29
QVQVQESGPGLVKPSQTLSLTCTVSGYSITSDYAWNWIRQPPGKKLEWIGYISNSGSTSYNPSLKSRVTISRDTSKNQFSLKLSSVTAADTAVYYCARERNYDYQAYYYAMDYWGQGTLVTVSS

SEQ ID NO: 1496 - protein, 124 aa, synthetic construct
  source 1..124: note = STEAP-A[STEAP1]_H1.30
QVQVQESGPGLVKPSQTLSLTCTVSGYSITSDYAWNWIRQPPGKKLEWIGYISNSGSTSYNPSLKSRVTISRDTSKNQFSLKLSSVTAADTAVYYCARERNYDYQEYYYAMDYWGQGTLVTVSS

SEQ ID NO: 1497 - protein, 124 aa, synthetic construct
  source 1..124: note = STEAP-A[STEAP1]_H1.31
QVQVQESGPGLVKPSQTLSLTCTVSGYSITSDYAWNWIRQPPGKKLEWIGYISNSGSTSYNPSLKSRVTISRDTSKNQFSLKLSSVTAADTAVYYCARERNYDYQLYYYAMDYWGQGTLVTVSS

SEQ ID NO: 1498 - protein, 124 aa, synthetic construct
  source 1..124: note = STEAP-A[STEAP1]_H1.32
QVQVQESGPGLVKPSQTLSLTCTVSGYSITSDYAWNWIRQPPGKKLEWIGYISNSGSTSYNPSLKSRVTISRDTSKNQFSLKLSSVTAADTAVYYCARERNYDYQQYYYAMDYWGQGTLVTVSS

SEQ ID NO: 1499 - protein, 124 aa, synthetic construct
  source 1..124: note = STEAP-A[STEAP1]_H1.33
QVQVQESGPGLVKPSQTLSLTCTVSGYSITSDYAWNWIRQPPGKKLEWIGYISNSGSTSYNPSLKSRVTISRDTSKNQFSLKLSSVTAADTAVYYCARERNYDYQTYYYAMDYWGQGTLVTVSS

SEQ ID NO: 1500 - protein, 124 aa, synthetic construct
  source 1..124: note = STEAP-A[STEAP1]_H1.34
QVQVQESGPGLVKPSQTLSLTCTVSGYSITSDYAWNWIRQPPGKKLEWIGYISNSGSTSYNPSLKSRVTISRDTSKNQFSLKLSSVTAADTAVYYCARERNYDYTAYYYAMDYWGQGTLVTVSS

SEQ ID NO: 1501 - protein, 124 aa, synthetic construct
  source 1..124: note = STEAP-A[STEAP1]_H1.35
QVQVQESGPGLVKPSQTLSLTCTVSGYSITSDYAWNWIRQPPGKKLEWIGYISNSGSTSYNPSLKSRVTISRDTSKNQFSLKLSSVTAADTAVYYCARERNYDYTEYYYAMDYWGQGTLVTVSS

SEQ ID NO: 1502 - protein, 124 aa, synthetic construct
  source 1..124: note = STEAP-A[STEAP1]_H1.36
QVQVQESGPGLVKPSQTLSLTCTVSGYSITSDYAWNWIRQPPGKKLEWIGYISNSGSTSYNPSLKSRVTISRDTSKNQFSLKLSSVTAADTAVYYCARERNYDYTLYYYAMDYWGQGTLVTVSS

SEQ ID NO: 1503 - protein, 124 aa, synthetic construct
  source 1..124: note = STEAP-A[STEAP1]_H1.37
QVQVQESGPGLVKPSQTLSLTCTVSGYSITSDYAWNWIRQPPGKKLEWIGYISNSGSTSYNPSLKSRVTISRDTSKNQFSLKLSSVTAADTAVYYCARERNYDYTQYYYAMDYWGQGTLVTVSS

SEQ ID NO: 1504 - protein, 124 aa, synthetic construct
  source 1..124: note = STEAP-A[STEAP1]_H1.38
QVQVQESGPGLVKPSQTLSLTCTVSGYSITSDYAWNWIRQPPGKKLEWIGYISNSGSTSYNPSLKSRVTISRDTSKNQFSLKLSSVTAADTAVYYCARERNYDYTTYYYAMDYWGQGTLVTVSS

SEQ ID NO: 1505 - protein, 124 aa, synthetic construct
  source 1..124: note = STEAP-A[STEAP1]_H1.39
QVQVQESGPGLVKPSQTLSLTCTVSGYSITSTYAWNWIRQPPGKKLEWIGYISNSGSTSYNPSLKSRVTISRDTSKNQFSLKLSSVTAADTAVYYCARERNYDYDDYYYAMDYWGQGTLVTVSS

SEQ ID NO: 1506 - protein, 124 aa, synthetic construct
  source 1..124: note = STEAP-A[STEAP1]_H1.40
QVQVQESGPGLVKPSQTLSLTCTVSGYSITSYYAWNWIRQPPGKKLEWIGYISNSGSTSYNPSLKSRVTISRDTSKNQFSLKLSSVTAADTAVYYCARERNYDYDDYYYAMDYWGQGTLVTVSS

SEQ ID NO: 1507 - protein, 124 aa, synthetic construct
  source 1..124: note = STEAP-A[STEAP1]_H1.41
QVQVQESGPGLVKPSQTLSLTCTVSGYSITSDAAWNWIRQPPGKKLEWIGYISNSGSTSYNPSLKSRVTISRDTSKNQFSLKLSSVTAADTAVYYCARERNYDYDDYYYAMDYWGQGTLVTVSS

SEQ ID NO: 1508 - protein, 124 aa, synthetic construct
  source 1..124: note = STEAP-A[STEAP1]_H1.42
QVQVQESGPGLVKPSQTLSLTCTVSGYSITSDDAWNWIRQPPGKKLEWIGYISNSGSTSYNPSLKSRVTISRDTSKNQFSLKLSSVTAADTAVYYCARERNYDYDDYYYAMDYWGQGTLVTVSS

SEQ ID NO: 1509 - protein, 124 aa, synthetic construct
  source 1..124: note = STEAP-A[STEAP1]_H1.43
QVQVQESGPGLVKPSQTLSLTCTVSGYSITSDKAWNWIRQPPGKKLEWIGYISNSGSTSYNPSLKSRVTISRDTSKNQFSLKLSSVTAADTAVYYCARERNYDYDDYYYAMDYWGQGTLVTVSS

SEQ ID NO: 1510 - protein, 124 aa, synthetic construct
  source 1..124: note = STEAP-A[STEAP1]_H1.44
QVQVQESGPGLVKPSQTLSLTCTVSGYSITSDLAWNWIRQPPGKKLEWIGYISNSGSTSYNPSLKSRVTISRDTSKNQFSLKLSSVTAADTAVYYCARERNYDYDDYYYAMDYWGQGTLVTVSS

SEQ ID NO: 1511 - protein, 124 aa, synthetic construct
  source 1..124: note = STEAP-A[STEAP1]_H1.45
QVQVQESGPGLVKPSQTLSLTCTVSGYSITSDQAWNWIRQPPGKKLEWIGYISNSGSTSYNPSLKSRVTISRDTSKNQFSLKLSSVTAADTAVYYCARERNYDYDDYYYAMDYWGQGTLVTVSS

SEQ ID NO: 1512 - protein, 124 aa, synthetic construct
  source 1..124: note = STEAP-A[STEAP1]_H1.46
QVQVQESGPGLVKPSQTLSLTCTVSGYSITSDYDWNWIRQPPGKKLEWIGYISNSGSTSYNPSLKSRVTISRDTSKNQFSLKLSSVTAADTAVYYCARERNYDYDDYYYAMDYWGQGTLVTVSS

SEQ ID NO: 1513 - protein, 124 aa, synthetic construct
  source 1..124: note = STEAP-A[STEAP1]_H1.47
QVQVQESGPGLVKPSQTLSLTCTVSGYSITSDYFWNWIRQPPGKKLEWIGYISNSGSTSYNPSLKSRVTISRDTSKNQFSLKLSSVTAADTAVYYCARERNYDYDDYYYAMDYWGQGTLVTVSS

SEQ ID NO: 1514 - protein, 124 aa, synthetic construct
  source 1..124: note = STEAP-A[STEAP1]_H1.48
QVQVQESGPGLVKPSQTLSLTCTVSGYSITSDYGWNWIRQPPGKKLEWIGYISNSGSTSYNPSLKSRVTISRDTSKNQFSLKLSSVTAADTAVYYCARERNYDYDDYYYAMDYWGQGTLVTVSS

SEQ ID NO: 1515 - protein, 124 aa, synthetic construct
  source 1..124: note = STEAP-A[STEAP1]_H1.49
QVQVQESGPGLVKPSQTLSLTCTVSGYSITSDYHWNWIRQPPGKKLEWIGYISNSGSTSYNPSLKSRVTISRDTSKNQFSLKLSSVTAADTAVYYCARERNYDYDDYYYAMDYWGQGTLVTVSS

SEQ ID NO: 1516 - protein, 124 aa, synthetic construct
  source 1..124: note = STEAP-A[STEAP1]_H1.50
QVQVQESGPGLVKPSQTLSLTCTVSGYSITSDYKWNWIRQPPGKKLEWIGYISNSGSTSYNPSLKSRVTISRDTSKNQFSLKLSSVTAADTAVYYCARERNYDYDDYYYAMDYWGQGTLVTVSS

SEQ ID NO: 1517 - protein, 124 aa, synthetic construct
  source 1..124: note = STEAP-A[STEAP1]_H1.51
QVQVQESGPGLVKPSQTLSLTCTVSGYSITSDYLWNWIRQPPGKKLEWIGYISNSGSTSYNPSLKSRVTISRDTSKNQFSLKLSSVTAADTAVYYCARERNYDYDDYYYAMDYWGQGTLVTVSS

SEQ ID NO: 1518 - protein, 124 aa, synthetic construct
  source 1..124: note = STEAP-A[STEAP1]_H1.52
QVQVQESGPGLVKPSQTLSLTCTVSGYSITSDYQWNWIRQPPGKKLEWIGYISNSGSTSYNPSLKSRVTISRDTSKNQFSLKLSSVTAADTAVYYCARERNYDYDDYYYAMDYWGQGTLVTVSS

SEQ ID NO: 1519 - protein, 124 aa, synthetic construct
  source 1..124: note = STEAP-A[STEAP1]_H1.53
QVQVQESGPGLVKPSQTLSLTCTVSGYSITSDYSWNWIRQPPGKKLEWIGYISNSGSTSYNPSLKSRVTISRDTSKNQFSLKLSSVTAADTAVYYCARERNYDYDDYYYAMDYWGQGTLVTVSS

SEQ ID NO: 1520 - protein, 124 aa, synthetic construct
  source 1..124: note = STEAP-A[STEAP1]_H1.54
QVQVQESGPGLVKPSQTLSLTCTVSGYSITSDYTWNWIRQPPGKKLEWIGYISNSGSTSYNPSLKSRVTISRDTSKNQFSLKLSSVTAADTAVYYCARERNYDYDDYYYAMDYWGQGTLVTVSS

SEQ ID NO: 1521 - protein, 124 aa, synthetic construct
  source 1..124: note = STEAP-A[STEAP1]_H1.55
QVQVQESGPGLVKPSQTLSLTCTVSGYSITSDYAWGWIRQPPGKKLEWIGYISNSGSTSYNPSLKSRVTISRDTSKNQFSLKLSSVTAADTAVYYCARERNYDYDDYYYAMDYWGQGTLVTVSS

SEQ ID NO: 1522 - protein, 124 aa, synthetic construct
  source 1..124: note = STEAP-A[STEAP1]_H1.56
QVQVQESGPGLVKPSQTLSLTCTVSGYSITSDYAWHWIRQPPGKKLEWIGYISNSGSTSYNPSLKSRVTISRDTSKNQFSLKLSSVTAADTAVYYCARERNYDYDDYYYAMDYWGQGTLVTVSS

SEQ ID NO: 1523 - protein, 124 aa, synthetic construct
  source 1..124: note = STEAP-A[STEAP1]_H1.57
QVQVQESGPGLVKPSQTLSLTCTVSGYSITSDYAWSWIRQPPGKKLEWIGYISNSGSTSYNPSLKSRVTISRDTSKNQFSLKLSSVTAADTAVYYCARERNYDYDDYYYAMDYWGQGTLVTVSS

SEQ ID NO: 1524 - protein, 124 aa, synthetic construct
  source 1..124: note = STEAP-A[STEAP1]_H1.58
QVQVQESGPGLVKPSQTLSLTCTVSGYSITSDYAWTWIRQPPGKKLEWIGYISNSGSTSYNPSLKSRVTISRDTSKNQFSLKLSSVTAADTAVYYCARERNYDYDDYYYAMDYWGQGTLVTVSS

SEQ ID NO: 1525 - protein, 124 aa, synthetic construct
  source 1..124: note = STEAP-A[STEAP1]_H1.59
QVQVQESGPGLVKPSQTLSLTCTVSGYSITSDYAWNWIRQPPGKKLEWIGAISNSGSTSYNPSLKSRVTISRDTSKNQFSLKLSSVTAADTAVYYCARERNYDYDDYYYAMDYWGQGTLVTVSS

SEQ ID NO: 1526 - protein, 124 aa, synthetic construct
  source 1..124: note = STEAP-A[STEAP1]_H1.60
QVQVQESGPGLVKPSQTLSLTCTVSGYSITSDYAWNWIRQPPGKKLEWIGDISNSGSTSYNPSLKSRVTISRDTSKNQFSLKLSSVTAADTAVYYCARERNYDYDDYYYAMDYWGQGTLVTVSS

SEQ ID NO: 1527 - protein, 124 aa, synthetic construct
  source 1..124: note = STEAP-A[STEAP1]_H1.61
QVQVQESGPGLVKPSQTLSLTCTVSGYSITSDYAWNWIRQPPGKKLEWIGFISNSGSTSYNPSLKSRVTISRDTSKNQFSLKLSSVTAADTAVYYCARERNYDYDDYYYAMDYWGQGTLVTVSS

SEQ ID NO: 1528 - protein, 124 aa, synthetic construct
  source 1..124: note = STEAP-A[STEAP1]_H1.62
QVQVQESGPGLVKPSQTLSLTCTVSGYSITSDYAWNWIRQPPGKKLEWIGHISNSGSTSYNPSLKSRVTISRDTSKNQFSLKLSSVTAADTAVYYCARERNYDYDDYYYAMDYWGQGTLVTVSS

SEQ ID NO: 1529 - protein, 124 aa, synthetic construct
  source 1..124: note = STEAP-A[STEAP1]_H1.63
QVQVQESGPGLVKPSQTLSLTCTVSGYSITSDYAWNWIRQPPGKKLEWIGKISNSGSTSYNPSLKSRVTISRDTSKNQFSLKLSSVTAADTAVYYCARERNYDYDDYYYAMDYWGQGTLVTVSS

SEQ ID NO: 1530 - protein, 124 aa, synthetic construct
  source 1..124: note = STEAP-A[STEAP1]_H1.64
QVQVQESGPGLVKPSQTLSLTCTVSGYSITSDYAWNWIRQPPGKKLEWIGLISNSGSTSYNPSLKSRVTISRDTSKNQFSLKLSSVTAADTAVYYCARERNYDYDDYYYAMDYWGQGTLVTVSS

SEQ ID NO: 1531 - protein, 124 aa, synthetic construct
  source 1..124: note = STEAP-A[STEAP1]_H1.65
QVQVQESGPGLVKPSQTLSLTCTVSGYSITSDYAWNWIRQPPGKKLEWIGQISNSGSTSYNPSLKSRVTISRDTSKNQFSLKLSSVTAADTAVYYCARERNYDYDDYYYAMDYWGQGTLVTVSS

SEQ ID NO: 1532 - protein, 124 aa, synthetic construct
  source 1..124: note = STEAP-A[STEAP1]_H1.66
QVQVQESGPGLVKPSQTLSLTCTVSGYSITSDYAWNWIRQPPGKKLEWIGVISNSGSTSYNPSLKSRVTISRDTSKNQFSLKLSSVTAADTAVYYCARERNYDYDDYYYAMDYWGQGTLVTVSS

SEQ ID NO: 1533 - protein, 124 aa, synthetic construct
  source 1..124: note = STEAP-A[STEAP1]_H1.67
QVQVQESGPGLVKPSQTLSLTCTVSGYSITSDYAWNWIRQPPGKKLEWIGWISNSGSTSYNPSLKSRVTISRDTSKNQFSLKLSSVTAADTAVYYCARERNYDYDDYYYAMDYWGQGTLVTVSS

SEQ ID NO: 1534 - protein, 124 aa, synthetic construct
  source 1..124: note = STEAP-A[STEAP1]_H1.68
QVQVQESGPGLVKPSQTLSLTCTVSGYSITSDYAWNWIRQPPGKKLEWIGYIANSGSTSYNPSLKSRVTISRDTSKNQFSLKLSSVTAADTAVYYCARERNYDYDDYYYAMDYWGQGTLVTVSS

SEQ ID NO: 1535 - protein, 124 aa, synthetic construct
  source 1..124: note = STEAP-A[STEAP1]_H1.69
QVQVQESGPGLVKPSQTLSLTCTVSGYSITSDYAWNWIRQPPGKKLEWIGYIDNSGSTSYNPSLKSRVTISRDTSKNQFSLKLSSVTAADTAVYYCARERNYDYDDYYYAMDYWGQGTLVTVSS

SEQ ID NO: 1536 - protein, 124 aa, synthetic construct
  source 1..124: note = STEAP-A[STEAP1]_H1.70
QVQVQESGPGLVKPSQTLSLTCTVSGYSITSDYAWNWIRQPPGKKLEWIGYIGNSGSTSYNPSLKSRVTISRDTSKNQFSLKLSSVTAADTAVYYCARERNYDYDDYYYAMDYWGQGTLVTVSS

SEQ ID NO: 1537 - protein, 124 aa, synthetic construct
  source 1..124: note = STEAP-A[STEAP1]_H1.71
QVQVQESGPGLVKPSQTLSLTCTVSGYSITSDYAWNWIRQPPGKKLEWIGYIHNSGSTSYNPSLKSRVTISRDTSKNQFSLKLSSVTAADTAVYYCARERNYDYDDYYYAMDYWGQGTLVTVSS

SEQ ID NO: 1538 - protein, 124 aa, synthetic construct
  source 1..124: note = STEAP-A[STEAP1]_H1.72
QVQVQESGPGLVKPSQTLSLTCTVSGYSITSDYAWNWIRQPPGKKLEWIGYIKNSGSTSYNPSLKSRVTISRDTSKNQFSLKLSSVTAADTAVYYCARERNYDYDDYYYAMDYWGQGTLVTVSS

SEQ ID NO: 1539 - protein, 124 aa, synthetic construct
  source 1..124: note = STEAP-A[STEAP1]_H1.73
QVQVQESGPGLVKPSQTLSLTCTVSGYSITSDYAWNWIRQPPGKKLEWIGYIQNSGSTSYNPSLKSRVTISRDTSKNQFSLKLSSVTAADTAVYYCARERNYDYDDYYYAMDYWGQGTLVTVSS

SEQ ID NO: 1540 - protein, 124 aa, synthetic construct
  source 1..124: note = STEAP-A[STEAP1]_H1.74
QVQVQESGPGLVKPSQTLSLTCTVSGYSITSDYAWNWIRQPPGKKLEWIGYITNSGSTSYNPSLKSRVTISRDTSKNQFSLKLSSVTAADTAVYYCARERNYDYDDYYYAMDYWGQGTLVTVSS

SEQ ID NO: 1541 - protein, 124 aa, synthetic construct
  source 1..124: note = STEAP-A[STEAP1]_H1.75
QVQVQESGPGLVKPSQTLSLTCTVSGYSITSDYAWNWIRQPPGKKLEWIGYIVNSGSTSYNPSLKSRVTISRDTSKNQFSLKLSSVTAADTAVYYCARERNYDYDDYYYAMDYWGQGTLVTVSS

SEQ ID NO: 1542 - protein, 124 aa, synthetic construct
  source 1..124: note = STEAP-A[STEAP1]_H1.76
QVQVQESGPGLVKPSQTLSLTCTVSGYSITSDYAWNWIRQPPGKKLEWIGYIYNSGSTSYNPSLKSRVTISRDTSKNQFSLKLSSVTAADTAVYYCARERNYDYDDYYYAMDYWGQGTLVTVSS

SEQ ID NO: 1543 - protein, 124 aa, synthetic construct
  source 1..124: note = STEAP-A[STEAP1]_H1.77
QVQVQESGPGLVKPSQTLSLTCTVSGYSITSDYAWNWIRQPPGKKLEWIGYISESGSTSYNPSLKSRVTISRDTSKNQFSLKLSSVTAADTAVYYCARERNYDYDDYYYAMDYWGQGTLVTVSS

SEQ ID NO: 1544 - protein, 124 aa, synthetic construct
  source 1..124: note = STEAP-A[STEAP1]_H1.78
QVQVQESGPGLVKPSQTLSLTCTVSGYSITSDYAWNWIRQPPGKKLEWIGYISHSGSTSYNPSLKSRVTISRDTSKNQFSLKLSSVTAADTAVYYCARERNYDYDDYYYAMDYWGQGTLVTVSS

SEQ ID NO: 1545 - protein, 124 aa, synthetic construct
  source 1..124: note = STEAP-A[STEAP1]_H1.79
QVQVQESGPGLVKPSQTLSLTCTVSGYSITSDYAWNWIRQPPGKKLEWIGYISLSGSTSYNPSLKSRVTISRDTSKNQFSLKLSSVTAADTAVYYCARERNYDYDDYYYAMDYWGQGTLVTVSS

SEQ ID NO: 1546 - protein, 124 aa, synthetic construct
  source 1..124: note = STEAP-A[STEAP1]_H1.80
QVQVQESGPGLVKPSQTLSLTCTVSGYSITSDYAWNWIRQPPGKKLEWIGYISQSGSTSYNPSLKSRVTISRDTSKNQFSLKLSSVTAADTAVYYCARERNYDYDDYYYAMDYWGQGTLVTVSS

SEQ ID NO: 1547 - protein, 124 aa, synthetic construct
  source 1..124: note = STEAP-A[STEAP1]_H1.81
QVQVQESGPGLVKPSQTLSLTCTVSGYSITSDYAWNWIRQPPGKKLEWIGYISRSGSTSYNPSLKSRVTISRDTSKNQFSLKLSSVTAADTAVYYCARERNYDYDDYYYAMDYWGQGTLVTVSS

SEQ ID NO: 1548 - protein, 124 aa, synthetic construct
  source 1..124: note = STEAP-A[STEAP1]_H1.82
QVQVQESGPGLVKPSQTLSLTCTVSGYSITSDYAWNWIRQPPGKKLEWIGYISNAGSTSYNPSLKSRVTISRDTSKNQFSLKLSSVTAADTAVYYCARERNYDYDDYYYAMDYWGQGTLVTVSS

SEQ ID NO: 1549 - protein, 124 aa, synthetic construct
  source 1..124: note = STEAP-A[STEAP1]_H1.83
QVQVQESGPGLVKPSQTLSLTCTVSGYSITSDYAWNWIRQPPGKKLEWIGYISNEGSTSYNPSLKSRVTISRDTSKNQFSLKLSSVTAADTAVYYCARERNYDYDDYYYAMDYWGQGTLVTVSS

SEQ ID NO: 1550 - protein, 124 aa, synthetic construct
  source 1..124: note = STEAP-A[STEAP1]_H1.84
QVQVQESGPGLVKPSQTLSLTCTVSGYSITSDYAWNWIRQPPGKKLEWIGYISNGGSTSYNPSLKSRVTISRDTSKNQFSLKLSSVTAADTAVYYCARERNYDYDDYYYAMDYWGQGTLVTVSS

SEQ ID NO: 1551 - protein, 124 aa, synthetic construct
  source 1..124: note = STEAP-A[STEAP1]_H1.85
QVQVQESGPGLVKPSQTLSLTCTVSGYSITSDYAWNWIRQPPGKKLEWIGYISNHGSTSYNPSLKSRVTISRDTSKNQFSLKLSSVTAADTAVYYCARERNYDYDDYYYAMDYWGQGTLVTVSS

SEQ ID NO: 1552 - protein, 124 aa, synthetic construct
  source 1..124: note = STEAP-A[STEAP1]_H1.86
QVQVQESGPGLVKPSQTLSLTCTVSGYSITSDYAWNWIRQPPGKKLEWIGYISNIGSTSYNPSLKSRVTISRDTSKNQFSLKLSSVTAADTAVYYCARERNYDYDDYYYAMDYWGQGTLVTVSS

SEQ ID NO: 1553 - protein, 124 aa, synthetic construct
  source 1..124: note = STEAP-A[STEAP1]_H1.87
QVQVQESGPGLVKPSQTLSLTCTVSGYSITSDYAWNWIRQPPGKKLEWIGYISNKGSTSYNPSLKSRVTISRDTSKNQFSLKLSSVTAADTAVYYCARERNYDYDDYYYAMDYWGQGTLVTVSS

SEQ ID NO: 1554 - protein, 124 aa, synthetic construct
  source 1..124: note = STEAP-A[STEAP1]_H1.88
QVQVQESGPGLVKPSQTLSLTCTVSGYSITSDYAWNWIRQPPGKKLEWIGYISNQGSTSYNPSLKSRVTISRDTSKNQFSLKLSSVTAADTAVYYCARERNYDYDDYYYAMDYWGQGTLVTVSS

SEQ ID NO: 1555 - protein, 124 aa, synthetic construct
  source 1..124: note = STEAP-A[STEAP1]_H1.89
QVQVQESGPGLVKPSQTLSLTCTVSGYSITSDYAWNWIRQPPGKKLEWIGYISNTGSTSYNPSLKSRVTISRDTSKNQFSLKLSSVTAADTAVYYCARERNYDYDDYYYAMDYWGQGTLVTVSS

SEQ ID NO: 1556 - protein, 124 aa, synthetic construct
  source 1..124: note = STEAP-A[STEAP1]_H1.90
QVQVQESGPGLVKPSQTLSLTCTVSGYSITSDYAWNWIRQPPGKKLEWIGYISNYGSTSYNPSLKSRVTISRDTSKNQFSLKLSSVTAADTAVYYCARERNYDYDDYYYAMDYWGQGTLVTVSS

SEQ ID NO: 1557 - protein, 124 aa, synthetic construct
  source 1..124: note = STEAP-A[STEAP1]_H1.91
QVQVQESGPGLVKPSQTLSLTCTVSGYSITSDYAWNWIRQPPGKKLEWIGYISNSASTSYNPSLKSRVTISRDTSKNQFSLKLSSVTAADTAVYYCARERNYDYDDYYYAMDYWGQGTLVTVSS

SEQ ID NO: 1558 - protein, 124 aa, synthetic construct
  source 1..124: note = STEAP-A[STEAP1]_H1.92
QVQVQESGPGLVKPSQTLSLTCTVSGYSITSDYAWNWIRQPPGKKLEWIGYISNSESTSYNPSLKSRVTISRDTSKNQFSLKLSSVTAADTAVYYCARERNYDYDDYYYAMDYWGQGTLVTVSS

SEQ ID NO: 1559 - protein, 124 aa, synthetic construct
  source 1..124: note = STEAP-A[STEAP1]_H1.93
QVQVQESGPGLVKPSQTLSLTCTVSGYSITSDYAWNWIRQPPGKKLEWIGYISNSHSTSYNPSLKSRVTISRDTSKNQFSLKLSSVTAADTAVYYCARERNYDYDDYYYAMDYWGQGTLVTVSS

SEQ ID NO: 1560 - protein, 124 aa, synthetic construct
  source 1..124: note = STEAP-A[STEAP1]_H1.94
QVQVQESGPGLVKPSQTLSLTCTVSGYSITSDYAWNWIRQPPGKKLEWIGYISNSQSTSYNPSLKSRVTISRDTSKNQFSLKLSSVTAADTAVYYCARERNYDYDDYYYAMDYWGQGTLVTVSS

SEQ ID NO: 1561 - protein, 124 aa, synthetic construct
  source 1..124: note = STEAP-A[STEAP1]_H1.95
QVQVQESGPGLVKPSQTLSLTCTVSGYSITSDYAWNWIRQPPGKKLEWIGYISNSRSTSYNPSLKSRVTISRDTSKNQFSLKLSSVTAADTAVYYCARERNYDYDDYYYAMDYWGQGTLVTVSS

SEQ ID NO: 1562 - protein, 124 aa, synthetic construct
  source 1..124: note = STEAP-A[STEAP1]_H1.96
QVQVQESGPGLVKPSQTLSLTCTVSGYSITSDYAWNWIRQPPGKKLEWIGYISNSGATSYNPSLKSRVTISRDTSKNQFSLKLSSVTAADTAVYYCARERNYDYDDYYYAMDYWGQGTLVTVSS

SEQ ID NO: 1563 - protein, 124 aa, synthetic construct
  source 1..124: note = STEAP-A[STEAP1]_H1.97
QVQVQESGPGLVKPSQTLSLTCTVSGYSITSDYAWNWIRQPPGKKLEWIGYISNSGDTSYNPSLKSRVTISRDTSKNQFSLKLSSVTAADTAVYYCARERNYDYDDYYYAMDYWGQGTLVTVSS

SEQ ID NO: 1564 - protein, 124 aa, synthetic construct
  source 1..124: note = STEAP-A[STEAP1]_H1.98
QVQVQESGPGLVKPSQTLSLTCTVSGYSITSDYAWNWIRQPPGKKLEWIGYISNSGGTSYNPSLKSRVTISRDTSKNQFSLKLSSVTAADTAVYYCARERNYDYDDYYYAMDYWGQGTLVTVSS

SEQ ID NO: 1565 - protein, 124 aa, synthetic construct
  source 1..124: note = STEAP-A[STEAP1]_H1.99
QVQVQESGPGLVKPSQTLSLTCTVSGYSITSDYAWNWIRQPPGKKLEWIGYISNSGHTSYNPSLKSRVTISRDTSKNQFSLKLSSVTAADTAVYYCARERNYDYDDYYYAMDYWGQGTLVTVSS

SEQ ID NO: 1566 - protein, 124 aa, synthetic construct
  source 1..124: note = STEAP-A[STEAP1]_H1.100
QVQVQESGPGLVKPSQTLSLTCTVSGYSITSDYAWNWIRQPPGKKLEWIGYISNSGKTSYNPSLKSRVTISRDTSKNQFSLKLSSVTAADTAVYYCARERNYDYDDYYYAMDYWGQGTLVTVSS

SEQ ID NO: 1567 - protein, 124 aa, synthetic construct
  source 1..124: note = STEAP-A[STEAP1]_H1.101
QVQVQESGPGLVKPSQTLSLTCTVSGYSITSDYAWNWIRQPPGKKLEWIGYISNSGQTSYNPSLKSRVTISRDTSKNQFSLKLSSVTAADTAVYYCARERNYDYDDYYYAMDYWGQGTLVTVSS

SEQ ID NO: 1568 - protein, 124 aa, synthetic construct
  source 1..124: note = STEAP-A[STEAP1]_H1.102
QVQVQESGPGLVKPSQTLSLTCTVSGYSITSDYAWNWIRQPPGKKLEWIGYISNSGTTSYNPSLKSRVTISRDTSKNQFSLKLSSVTAADTAVYYCARERNYDYDDYYYAMDYWGQGTLVTVSS

SEQ ID NO: 1569 - protein, 124 aa, synthetic construct
  source 1..124: note = STEAP-A[STEAP1]_H1.103
QVQVQESGPGLVKPSQTLSLTCTVSGYSITSDYAWNWIRQPPGKKLEWIGYISNSGVTSYNPSLKSRVTISRDTSKNQFSLKLSSVTAADTAVYYCARERNYDYDDYYYAMDYWGQGTLVTVSS

SEQ ID NO: 1570 - protein, 124 aa, synthetic construct
  source 1..124: note = STEAP-A[STEAP1]_H1.104
QVQVQESGPGLVKPSQTLSLTCTVSGYSITSDYAWNWIRQPPGKKLEWIGYISNSGYTSYNPSLKSRVTISRDTSKNQFSLKLSSVTAADTAVYYCARERNYDYDDYYYAMDYWGQGTLVTVSS

SEQ ID NO: 1571 - protein, 124 aa, synthetic construct
  source 1..124: note = STEAP-A[STEAP1]_H1.105
QVQVQESGPGLVKPSQTLSLTCTVSGYSITSDYAWNWIRQPPGKKLEWIGYISNSGSKSYNPSLKSRVTISRDTSKNQFSLKLSSVTAADTAVYYCARERNYDYDDYYYAMDYWGQGTLVTVSS

SEQ ID NO: 1572 - protein, 124 aa, synthetic construct
  source 1..124: note = STEAP-A[STEAP1]_H1.106
QVQVQESGPGLVKPSQTLSLTCTVSGYSITSDYAWNWIRQPPGKKLEWIGYISNSGSTAYNPSLKSRVTISRDTSKNQFSLKLSSVTAADTAVYYCARERNYDYDDYYYAMDYWGQGTLVTVSS

SEQ ID NO: 1573 - protein, 124 aa, synthetic construct
  source 1..124: note = STEAP-A[STEAP1]_H1.107
QVQVQESGPGLVKPSQTLSLTCTVSGYSITSDYAWNWIRQPPGKKLEWIGYISNSGSTDYNPSLKSRVTISRDTSKNQFSLKLSSVTAADTAVYYCARERNYDYDDYYYAMDYWGQGTLVTVSS

SEQ ID NO: 1574 - protein, 124 aa, synthetic construct
  source 1..124: note = STEAP-A[STEAP1]_H1.108
QVQVQESGPGLVKPSQTLSLTCTVSGYSITSDYAWNWIRQPPGKKLEWIGYISNSGSTGYNPSLKSRVTISRDTSKNQFSLKLSSVTAADTAVYYCARERNYDYDDYYYAMDYWGQGTLVTVSS

SEQ ID NO: 1575 - protein, 124 aa, synthetic construct
  source 1..124: note = STEAP-A[STEAP1]_H1.109
QVQVQESGPGLVKPSQTLSLTCTVSGYSITSDYAWNWIRQPPGKKLEWIGYISNSGSTHYNPSLKSRVTISRDTSKNQFSLKLSSVTAADTAVYYCARERNYDYDDYYYAMDYWGQGTLVTVSS

SEQ ID NO: 1576 - protein, 124 aa, synthetic construct
  source 1..124: note = STEAP-A[STEAP1]_H1.110
QVQVQESGPGLVKPSQTLSLTCTVSGYSITSDYAWNWIRQPPGKKLEWIGYISNSGSTQYNPSLKSRVTISRDTSKNQFSLKLSSVTAADTAVYYCARERNYDYDDYYYAMDYWGQGTLVTVSS

SEQ ID NO: 1577 - protein, 124 aa, synthetic construct
  source 1..124: note = STEAP-A[STEAP1]_H1.111
QVQVQESGPGLVKPSQTLSLTCTVSGYSITSDYAWNWIRQPPGKKLEWIGYISNSGSTTYNPSLKSRVTISRDTSKNQFSLKLSSVTAADTAVYYCARERNYDYDDYYYAMDYWGQGTLVTVSS

SEQ ID NO: 1578 - protein, 124 aa, synthetic construct
  source 1..124: note = STEAP-A[STEAP1]_H1.112
QVQVQESGPGLVKPSQTLSLTCTVSGYSITSDYAWNWIRQPPGKKLEWIGYISNSGSTVYNPSLKSRVTISRDTSKNQFSLKLSSVTAADTAVYYCARERNYDYDDYYYAMDYWGQGTLVTVSS

SEQ ID NO: 1579 - protein, 124 aa, synthetic construct
  source 1..124: note = STEAP-A[STEAP1]_H1.113
QVQVQESGPGLVKPSQTLSLTCTVSGYSITSDYAWNWIRQPPGKKLEWIGYISNSGSTYYNPSLKSRVTISRDTSKNQFSLKLSSVTAADTAVYYCARERNYDYDDYYYAMDYWGQGTLVTVSS

SEQ ID NO: 1580 - protein, 124 aa, synthetic construct
  source 1..124: note = STEAP-A[STEAP1]_H1.114
QVQVQESGPGLVKPSQTLSLTCTVSGYSITSDYAWNWIRQPPGKKLEWIGYISNSGSTSYNPSLKSRVTISRDTSKNQFSLKLSSVTAADTAVYYCARHRNYDYDDYYYAMDYWGQGTLVTVSS

SEQ ID NO: 1581 - protein, 124 aa, synthetic construct
  source 1..124: note = STEAP-A[STEAP1]_H1.115
QVQVQESGPGLVKPSQTLSLTCTVSGYSITSDYAWNWIRQPPGKKLEWIGYISNSGSTSYNPSLKSRVTISRDTSKNQFSLKLSSVTAADTAVYYCARIRNYDYDDYYYAMDYWGQGTLVTVSS

SEQ ID NO: 1582 - protein, 124 aa, synthetic construct
  source 1..124: note = STEAP-A[STEAP1]_H1.116
QVQVQESGPGLVKPSQTLSLTCTVSGYSITSDYAWNWIRQPPGKKLEWIGYISNSGSTSYNPSLKSRVTISRDTSKNQFSLKLSSVTAADTAVYYCARKRNYDYDDYYYAMDYWGQGTLVTVSS

SEQ ID NO: 1583 - protein, 124 aa, synthetic construct
  source 1..124: note = STEAP-A[STEAP1]_H1.117
QVQVQESGPGLVKPSQTLSLTCTVSGYSITSDYAWNWIRQPPGKKLEWIGYISNSGSTSYNPSLKSRVTISRDTSKNQFSLKLSSVTAADTAVYYCARQRNYDYDDYYYAMDYWGQGTLVTVSS

SEQ ID NO: 1584 - protein, 124 aa, synthetic construct
  source 1..124: note = STEAP-A[STEAP1]_H1.118
QVQVQESGPGLVKPSQTLSLTCTVSGYSITSDYAWNWIRQPPGKKLEWIGYISNSGSTSYNPSLKSRVTISRDTSKNQFSLKLSSVTAADTAVYYCARSRNYDYDDYYYAMDYWGQGTLVTVSS

SEQ ID NO: 1585 - protein, 124 aa, synthetic construct
  source 1..124: note = STEAP-A[STEAP1]_H1.119
QVQVQESGPGLVKPSQTLSLTCTVSGYSITSDYAWNWIRQPPGKKLEWIGYISNSGSTSYNPSLKSRVTISRDTSKNQFSLKLSSVTAADTAVYYCAREENYDYDDYYYAMDYWGQGTLVTVSS

SEQ ID NO: 1586 - protein, 124 aa, synthetic construct
  source 1..124: note = STEAP-A[STEAP1]_H1.120
QVQVQESGPGLVKPSQTLSLTCTVSGYSITSDYAWNWIRQPPGKKLEWIGYISNSGSTSYNPSLKSRVTISRDTSKNQFSLKLSSVTAADTAVYYCAREHNYDYDDYYYAMDYWGQGTLVTVSS

SEQ ID NO: 1587 - protein, 124 aa, synthetic construct
  source 1..124: note = STEAP-A[STEAP1]_H1.121
QVQVQESGPGLVKPSQTLSLTCTVSGYSITSDYAWNWIRQPPGKKLEWIGYISNSGSTSYNPSLKSRVTISRDTSKNQFSLKLSSVTAADTAVYYCAREINYDYDDYYYAMDYWGQGTLVTVSS

SEQ ID NO: 1588 - protein, 124 aa, synthetic construct
  source 1..124: note = STEAP-A[STEAP1]_H1.122
QVQVQESGPGLVKPSQTLSLTCTVSGYSITSDYAWNWIRQPPGKKLEWIGYISNSGSTSYNPSLKSRVTISRDTSKNQFSLKLSSVTAADTAVYYCAREKNYDYDDYYYAMDYWGQGTLVTVSS

SEQ ID NO: 1589 - protein, 124 aa, synthetic construct
  source 1..124: note = STEAP-A[STEAP1]_H1.123
QVQVQESGPGLVKPSQTLSLTCTVSGYSITSDYAWNWIRQPPGKKLEWIGYISNSGSTSYNPSLKSRVTISRDTSKNQFSLKLSSVTAADTAVYYCAREQNYDYDDYYYAMDYWGQGTLVTVSS

SEQ ID NO: 1590 - protein, 124 aa, synthetic construct
  source 1..124: note = STEAP-A[STEAP1]_H1.124
QVQVQESGPGLVKPSQTLSLTCTVSGYSITSDYAWNWIRQPPGKKLEWIGYISNSGSTSYNPSLKSRVTISRDTSKNQFSLKLSSVTAADTAVYYCARERDYDYDDYYYAMDYWGQGTLVTVSS

SEQ ID NO: 1591 - protein, 124 aa, synthetic construct
  source 1..124: note = STEAP-A[STEAP1]_H1.125
QVQVQESGPGLVKPSQTLSLTCTVSGYSITSDYAWNWIRQPPGKKLEWIGYISNSGSTSYNPSLKSRVTISRDTSKNQFSLKLSSVTAADTAVYYCARERGYDYDDYYYAMDYWGQGTLVTVSS

SEQ ID NO: 1592 - protein, 124 aa, synthetic construct
  source 1..124: note = STEAP-A[STEAP1]_H1.126
QVQVQESGPGLVKPSQTLSLTCTVSGYSITSDYAWNWIRQPPGKKLEWIGYISNSGSTSYNPSLKSRVTISRDTSKNQFSLKLSSVTAADTAVYYCARERHYDYDDYYYAMDYWGQGTLVTVSS

SEQ ID NO: 1593 - protein, 124 aa, synthetic construct
  source 1..124: note = STEAP-A[STEAP1]_H1.127
QVQVQESGPGLVKPSQTLSLTCTVSGYSITSDYAWNWIRQPPGKKLEWIGYISNSGSTSYNPSLKSRVTISRDTSKNQFSLKLSSVTAADTAVYYCARERLYDYDDYYYAMDYWGQGTLVTVSS

SEQ ID NO: 1594 - protein, 124 aa, synthetic construct
  source 1..124: note = STEAP-A[STEAP1]_H1.128
QVQVQESGPGLVKPSQTLSLTCTVSGYSITSDYAWNWIRQPPGKKLEWIGYISNSGSTSYNPSLKSRVTISRDTSKNQFSLKLSSVTAADTAVYYCARERQYDYDDYYYAMDYWGQGTLVTVSS

SEQ ID NO: 1595 - protein, 124 aa, synthetic construct
  source 1..124: note = STEAP-A[STEAP1]_H1.129
QVQVQESGPGLVKPSQTLSLTCTVSGYSITSDYAWNWIRQPPGKKLEWIGYISNSGSTSYNPSLKSRVTISRDTSKNQFSLKLSSVTAADTAVYYCARERRYDYDDYYYAMDYWGQGTLVTVSS

SEQ ID NO: 1596 - protein, 124 aa, synthetic construct
  source 1..124: note = STEAP-A[STEAP1]_H1.130
QVQVQESGPGLVKPSQTLSLTCTVSGYSITSDYAWNWIRQPPGKKLEWIGYISNSGSTSYNPSLKSRVTISRDTSKNQFSLKLSSVTAADTAVYYCARERSYDYDDYYYAMDYWGQGTLVTVSS

SEQ ID NO: 1597 - protein, 124 aa, synthetic construct
  source 1..124: note = STEAP-A[STEAP1]_H1.131
QVQVQESGPGLVKPSQTLSLTCTVSGYSITSDYAWNWIRQPPGKKLEWIGYISNSGSTSYNPSLKSRVTISRDTSKNQFSLKLSSVTAADTAVYYCARERTYDYDDYYYAMDYWGQGTLVTVSS

SEQ ID NO: 1598 - protein, 124 aa, synthetic construct
  source 1..124: note = STEAP-A[STEAP1]_H1.132
QVQVQESGPGLVKPSQTLSLTCTVSGYSITSDYAWNWIRQPPGKKLEWIGYISNSGSTSYNPSLKSRVTISRDTSKNQFSLKLSSVTAADTAVYYCARERNADYDDYYYAMDYWGQGTLVTVSS

SEQ ID NO: 1599 - protein, 124 aa, synthetic construct
  source 1..124: note = STEAP-A[STEAP1]_H1.133
QVQVQESGPGLVKPSQTLSLTCTVSGYSITSDYAWNWIRQPPGKKLEWIGYISNSGSTSYNPSLKSRVTISRDTSKNQFSLKLSSVTAADTAVYYCARERNFDYDDYYYAMDYWGQGTLVTVSS

SEQ ID NO: 1600 - protein, 124 aa, synthetic construct
  source 1..124: note = STEAP-A[STEAP1]_H1.134
QVQVQESGPGLVKPSQTLSLTCTVSGYSITSDYAWNWIRQPPGKKLEWIGYISNSGSTSYNPSLKSRVTISRDTSKNQFSLKLSSVTAADTAVYYCARERNHDYDDYYYAMDYWGQGTLVTVSS

SEQ ID NO: 1601 - protein, 124 aa, synthetic construct
  source 1..124: note = STEAP-A[STEAP1]_H1.135
QVQVQESGPGLVKPSQTLSLTCTVSGYSITSDYAWNWIRQPPGKKLEWIGYISNSGSTSYNPSLKSRVTISRDTSKNQFSLKLSSVTAADTAVYYCARERNKDYDDYYYAMDYWGQGTLVTVSS

SEQ ID NO: 1602 - protein, 124 aa, synthetic construct
  source 1..124: note = STEAP-A[STEAP1]_H1.136
QVQVQESGPGLVKPSQTLSLTCTVSGYSITSDYAWNWIRQPPGKKLEWIGYISNSGSTSYNPSLKSRVTISRDTSKNQFSLKLSSVTAADTAVYYCARERNLDYDDYYYAMDYWGQGTLVTVSS

SEQ ID NO: 1603 - protein, 124 aa, synthetic construct
  source 1..124: note = STEAP-A[STEAP1]_H1.137
QVQVQESGPGLVKPSQTLSLTCTVSGYSITSDYAWNWIRQPPGKKLEWIGYISNSGSTSYNPSLKSRVTISRDTSKNQFSLKLSSVTAADTAVYYCARERNQDYDDYYYAMDYWGQGTLVTVSS

SEQ ID NO: 1604 - protein, 124 aa, synthetic construct
  source 1..124: note = STEAP-A[STEAP1]_H1.138
QVQVQESGPGLVKPSQTLSLTCTVSGYSITSDYAWNWIRQPPGKKLEWIGYISNSGSTSYNPSLKSRVTISRDTSKNQFSLKLSSVTAADTAVYYCARERNVDYDDYYYAMDYWGQGTLVTVSS

SEQ ID NO: 1605 - protein, 124 aa, synthetic construct
  source 1..124: note = STEAP-A[STEAP1]_H1.139
QVQVQESGPGLVKPSQTLSLTCTVSGYSITSDYAWNWIRQPPGKKLEWIGYISNSGSTSYNPSLKSRVTISRDTSKNQFSLKLSSVTAADTAVYYCARERNYEYDDYYYAMDYWGQGTLVTVSS

SEQ ID NO: 1606 - protein, 124 aa, synthetic construct
  source 1..124: note = STEAP-A[STEAP1]_H1.140
QVQVQESGPGLVKPSQTLSLTCTVSGYSITSDYAWNWIRQPPGKKLEWIGYISNSGSTSYNPSLKSRVTISRDTSKNQFSLKLSSVTAADTAVYYCARERNYGYDDYYYAMDYWGQGTLVTVSS

SEQ ID NO: 1607 - protein, 124 aa, synthetic construct
  source 1..124: note = STEAP-A[STEAP1]_H1.141
QVQVQESGPGLVKPSQTLSLTCTVSGYSITSDYAWNWIRQPPGKKLEWIGYISNSGSTSYNPSLKSRVTISRDTSKNQFSLKLSSVTAADTAVYYCARERNYHYDDYYYAMDYWGQGTLVTVSS

SEQ ID NO: 1608 - protein, 124 aa, synthetic construct
  source 1..124: note = STEAP-A[STEAP1]_H1.142
QVQVQESGPGLVKPSQTLSLTCTVSGYSITSDYAWNWIRQPPGKKLEWIGYISNSGSTSYNPSLKSRVTISRDTSKNQFSLKLSSVTAADTAVYYCARERNYLYDDYYYAMDYWGQGTLVTVSS

SEQ ID NO: 1609 - protein, 124 aa, synthetic construct
  source 1..124: note = STEAP-A[STEAP1]_H1.143
QVQVQESGPGLVKPSQTLSLTCTVSGYSITSDYAWNWIRQPPGKKLEWIGYISNSGSTSYNPSLKSRVTISRDTSKNQFSLKLSSVTAADTAVYYCARERNYNYDDYYYAMDYWGQGTLVTVSS

SEQ ID NO: 1610 - protein, 124 aa, synthetic construct
  source 1..124: note = STEAP-A[STEAP1]_H1.144
QVQVQESGPGLVKPSQTLSLTCTVSGYSITSDYAWNWIRQPPGKKLEWIGYISNSGSTSYNPSLKSRVTISRDTSKNQFSLKLSSVTAADTAVYYCARERNYRYDDYYYAMDYWGQGTLVTVSS

SEQ ID NO: 1611 - protein, 124 aa, synthetic construct
  source 1..124: note = STEAP-A[STEAP1]_H1.145
QVQVQESGPGLVKPSQTLSLTCTVSGYSITSDYAWNWIRQPPGKKLEWIGYISNSGSTSYNPSLKSRVTISRDTSKNQFSLKLSSVTAADTAVYYCARERNYSYDDYYYAMDYWGQGTLVTVSS

SEQ ID NO: 1612 - protein, 124 aa, synthetic construct
  source 1..124: note = STEAP-A[STEAP1]_H1.146
QVQVQESGPGLVKPSQTLSLTCTVSGYSITSDYAWNWIRQPPGKKLEWIGYISNSGSTSYNPSLKSRVTISRDTSKNQFSLKLSSVTAADTAVYYCARERNYTYDDYYYAMDYWGQGTLVTVSS

SEQ ID NO: 1613 - protein, 124 aa, synthetic construct
  source 1..124: note = STEAP-A[STEAP1]_H1.147
QVQVQESGPGLVKPSQTLSLTCTVSGYSITSDYAWNWIRQPPGKKLEWIGYISNSGSTSYNPSLKSRVTISRDTSKNQFSLKLSSVTAADTAVYYCARERNYDADDYYYAMDYWGQGTLVTVSS

SEQ ID NO: 1614 - protein, 124 aa, synthetic construct
  source 1..124: note = STEAP-A[STEAP1]_H1.148
QVQVQESGPGLVKPSQTLSLTCTVSGYSITSDYAWNWIRQPPGKKLEWIGYISNSGSTSYNPSLKSRVTISRDTSKNQFSLKLSSVTAADTAVYYCARERNYDFDDYYYAMDYWGQGTLVTVSS

SEQ ID NO: 1615 - protein, 124 aa, synthetic construct
  source 1..124: note = STEAP-A[STEAP1]_H1.149
QVQVQESGPGLVKPSQTLSLTCTVSGYSITSDYAWNWIRQPPGKKLEWIGYISNSGSTSYNPSLKSRVTISRDTSKNQFSLKLSSVTAADTAVYYCARERNYDHDDYYYAMDYWGQGTLVTVSS

SEQ ID NO: 1616 - protein, 124 aa, synthetic construct
  source 1..124: note = STEAP-A[STEAP1]_H1.150
QVQVQESGPGLVKPSQTLSLTCTVSGYSITSDYAWNWIRQPPGKKLEWIGYISNSGSTSYNPSLKSRVTISRDTSKNQFSLKLSSVTAADTAVYYCARERNYDKDDYYYAMDYWGQGTLVTVSS

SEQ ID NO: 1617 - protein, 124 aa, synthetic construct
  source 1..124: note = STEAP-A[STEAP1]_H1.151
QVQVQESGPGLVKPSQTLSLTCTVSGYSITSDYAWNWIRQPPGKKLEWIGYISNSGSTSYNPSLKSRVTISRDTSKNQFSLKLSSVTAADTAVYYCARERNYDLDDYYYAMDYWGQGTLVTVSS

SEQ ID NO: 1618 - protein, 124 aa, synthetic construct
  source 1..124: note = STEAP-A[STEAP1]_H1.152
QVQVQESGPGLVKPSQTLSLTCTVSGYSITSDYAWNWIRQPPGKKLEWIGYISNSGSTSYNPSLKSRVTISRDTSKNQFSLKLSSVTAADTAVYYCARERNYDQDDYYYAMDYWGQGTLVTVSS

SEQ ID NO: 1619 - protein, 124 aa, synthetic construct
  source 1..124: note = STEAP-A[STEAP1]_H1.153
QVQVQESGPGLVKPSQTLSLTCTVSGYSITSDYAWNWIRQPPGKKLEWIGYISNSGSTSYNPSLKSRVTISRDTSKNQFSLKLSSVTAADTAVYYCARERNYDVDDYYYAMDYWGQGTLVTVSS

SEQ ID NO: 1620 - protein, 124 aa, synthetic construct
  source 1..124: note = STEAP-A[STEAP1]_H1.154
QVQVQESGPGLVKPSQTLSLTCTVSGYSITSDYAWNWIRQPPGKKLEWIGYISNSGSTSYNPSLKSRVTISRDTSKNQFSLKLSSVTAADTAVYYCARERNYDYGDYYYAMDYWGQGTLVTVSS

SEQ ID NO: 1621 - protein, 124 aa, synthetic construct
  source 1..124: note = STEAP-A[STEAP1]_H1.155
QVQVQESGPGLVKPSQTLSLTCTVSGYSITSDYAWNWIRQPPGKKLEWIGYISNSGSTSYNPSLKSRVTISRDTSKNQFSLKLSSVTAADTAVYYCARERNYDYHDYYYAMDYWGQGTLVTVSS

SEQ ID NO: 1622 - protein, 124 aa, synthetic construct
  source 1..124: note = STEAP-A[STEAP1]_H1.156
QVQVQESGPGLVKPSQTLSLTCTVSGYSITSDYAWNWIRQPPGKKLEWIGYISNSGSTSYNPSLKSRVTISRDTSKNQFSLKLSSVTAADTAVYYCARERNYDYNDYYYAMDYWGQGTLVTVSS

SEQ ID NO: 1623 - protein, 124 aa, synthetic construct
  source 1..124: note = STEAP-A[STEAP1]_H1.157
QVQVQESGPGLVKPSQTLSLTCTVSGYSITSDYAWNWIRQPPGKKLEWIGYISNSGSTSYNPSLKSRVTISRDTSKNQFSLKLSSVTAADTAVYYCARERNYDYRDYYYAMDYWGQGTLVTVSS

SEQ ID NO: 1624 - protein, 124 aa, synthetic construct
  source 1..124: note = STEAP-A[STEAP1]_H1.158
QVQVQESGPGLVKPSQTLSLTCTVSGYSITSDYAWNWIRQPPGKKLEWIGYISNSGSTSYNPSLKSRVTISRDTSKNQFSLKLSSVTAADTAVYYCARERNYDYSDYYYAMDYWGQGTLVTVSS

SEQ ID NO: 1625 - protein, 124 aa, synthetic construct
  source 1..124: note = STEAP-A[STEAP1]_H1.159
QVQVQESGPGLVKPSQTLSLTCTVSGYSITSDYAWNWIRQPPGKKLEWIGYISNSGSTSYNPSLKSRVTISRDTSKNQFSLKLSSVTAADTAVYYCARERNYDYDGYYYAMDYWGQGTLVTVSS

SEQ ID NO: 1626 - protein, 124 aa, synthetic construct
  source 1..124: note = STEAP-A[STEAP1]_H1.160
QVQVQESGPGLVKPSQTLSLTCTVSGYSITSDYAWNWIRQPPGKKLEWIGYISNSGSTSYNPSLKSRVTISRDTSKNQFSLKLSSVTAADTAVYYCARERNYDYDHYYYAMDYWGQGTLVTVSS

SEQ ID NO: 1627 - protein, 124 aa, synthetic construct
  source 1..124: note = STEAP-A[STEAP1]_H1.161
QVQVQESGPGLVKPSQTLSLTCTVSGYSITSDYAWNWIRQPPGKKLEWIGYISNSGSTSYNPSLKSRVTISRDTSKNQFSLKLSSVTAADTAVYYCARERNYDYDIYYYAMDYWGQGTLVTVSS

SEQ ID NO: 1628 - protein, 124 aa, synthetic construct
  source 1..124: note = STEAP-A[STEAP1]_H1.162
QVQVQESGPGLVKPSQTLSLTCTVSGYSITSDYAWNWIRQPPGKKLEWIGYISNSGSTSYNPSLKSRVTISRDTSKNQFSLKLSSVTAADTAVYYCARERNYDYDNYYYAMDYWGQGTLVTVSS

SEQ ID NO: 1629 - protein, 124 aa, synthetic construct
  source 1..124: note = STEAP-A[STEAP1]_H1.163
QVQVQESGPGLVKPSQTLSLTCTVSGYSITSDYAWNWIRQPPGKKLEWIGYISNSGSTSYNPSLKSRVTISRDTSKNQFSLKLSSVTAADTAVYYCARERNYDYDRYYYAMDYWGQGTLVTVSS

SEQ ID NO: 1630 - protein, 124 aa, synthetic construct
  source 1..124: note = STEAP-A[STEAP1]_H1.164
QVQVQESGPGLVKPSQTLSLTCTVSGYSITSDYAWNWIRQPPGKKLEWIGYISNSGSTSYNPSLKSRVTISRDTSKNQFSLKLSSVTAADTAVYYCARERNYDYDSYYYAMDYWGQGTLVTVSS

SEQ ID NO: 1631 - protein, 124 aa, synthetic construct
  source 1..124: note = STEAP-A[STEAP1]_H1.165
QVQVQESGPGLVKPSQTLSLTCTVSGYSITSDYAWNWIRQPPGKKLEWIGYISNSGSTSYNPSLKSRVTISRDTSKNQFSLKLSSVTAADTAVYYCARERNYDYDVYYYAMDYWGQGTLVTVSS

SEQ ID NO: 1632 - protein, 124 aa, synthetic construct
  source 1..124: note = STEAP-A[STEAP1]_H1.166
QVQVQESGPGLVKPSQTLSLTCTVSGYSITSDYAWNWIRQPPGKKLEWIGYISNSGSTSYNPSLKSRVTISRDTSKNQFSLKLSSVTAADTAVYYCARERNYDYEGYYYAMDYWGQGTLVTVSS

SEQ ID NO: 1633 - protein, 124 aa, synthetic construct
  source 1..124: note = STEAP-A[STEAP1]_H1.167
QVQVQESGPGLVKPSQTLSLTCTVSGYSITSDYAWNWIRQPPGKKLEWIGYISNSGSTSYNPSLKSRVTISRDTSKNQFSLKLSSVTAADTAVYYCARERNYDYEHYYYAMDYWGQGTLVTVSS

SEQ ID NO: 1634 - protein, 124 aa, synthetic construct
  source 1..124: note = STEAP-A[STEAP1]_H1.168
QVQVQESGPGLVKPSQTLSLTCTVSGYSITSDYAWNWIRQPPGKKLEWIGYISNSGSTSYNPSLKSRVTISRDTSKNQFSLKLSSVTAADTAVYYCARERNYDYEIYYYAMDYWGQGTLVTVSS

SEQ ID NO: 1635 - protein, 124 aa, synthetic construct
  source 1..124: note = STEAP-A[STEAP1]_H1.169
QVQVQESGPGLVKPSQTLSLTCTVSGYSITSDYAWNWIRQPPGKKLEWIGYISNSGSTSYNPSLKSRVTISRDTSKNQFSLKLSSVTAADTAVYYCARERNYDYENYYYAMDYWGQGTLVTVSS

SEQ ID NO: 1636 - protein, 124 aa, synthetic construct
  source 1..124: note = STEAP-A[STEAP1]_H1.170
QVQVQESGPGLVKPSQTLSLTCTVSGYSITSDYAWNWIRQPPGKKLEWIGYISNSGSTSYNPSLKSRVTISRDTSKNQFSLKLSSVTAADTAVYYCARERNYDYERYYYAMDYWGQGTLVTVSS

SEQ ID NO: 1637 - protein, 124 aa, synthetic construct
  source 1..124: note = STEAP-A[STEAP1]_H1.171
QVQVQESGPGLVKPSQTLSLTCTVSGYSITSDYAWNWIRQPPGKKLEWIGYISNSGSTSYNPSLKSRVTISRDTSKNQFSLKLSSVTAADTAVYYCARERNYDYESYYYAMDYWGQGTLVTVSS

SEQ ID NO: 1638 - protein, 124 aa, synthetic construct
  source 1..124: note = STEAP-A[STEAP1]_H1.172
QVQVQESGPGLVKPSQTLSLTCTVSGYSITSDYAWNWIRQPPGKKLEWIGYISNSGSTSYNPSLKSRVTISRDTSKNQFSLKLSSVTAADTAVYYCARERNYDYEVYYYAMDYWGQGTLVTVSS

SEQ ID NO: 1639 - protein, 124 aa, synthetic construct
  source 1..124: note = STEAP-A[STEAP1]_H1.173
QVQVQESGPGLVKPSQTLSLTCTVSGYSITSDYAWNWIRQPPGKKLEWIGYISNSGSTSYNPSLKSRVTISRDTSKNQFSLKLSSVTAADTAVYYCARERNYDYDDAYYAMDYWGQGTLVTVSS

SEQ ID NO: 1640 - protein, 124 aa, synthetic construct
  source 1..124: note = STEAP-A[STEAP1]_H1.174
QVQVQESGPGLVKPSQTLSLTCTVSGYSITSDYAWNWIRQPPGKKLEWIGYISNSGSTSYNPSLKSRVTISRDTSKNQFSLKLSSVTAADTAVYYCARERNYDYDDFYYAMDYWGQGTLVTVSS

SEQ ID NO: 1641 - protein, 124 aa, synthetic construct
  source 1..124: note = STEAP-A[STEAP1]_H1.175
QVQVQESGPGLVKPSQTLSLTCTVSGYSITSDYAWNWIRQPPGKKLEWIGYISNSGSTSYNPSLKSRVTISRDTSKNQFSLKLSSVTAADTAVYYCARERNYDYDDHYYAMDYWGQGTLVTVSS

SEQ ID NO: 1642 - protein, 124 aa, synthetic construct
  source 1..124: note = STEAP-A[STEAP1]_H1.176
QVQVQESGPGLVKPSQTLSLTCTVSGYSITSDYAWNWIRQPPGKKLEWIGYISNSGSTSYNPSLKSRVTISRDTSKNQFSLKLSSVTAADTAVYYCARERNYDYDDKYYAMDYWGQGTLVTVSS

SEQ ID NO: 1643 - protein, 124 aa, synthetic construct
  source 1..124: note = STEAP-A[STEAP1]_H1.177
QVQVQESGPGLVKPSQTLSLTCTVSGYSITSDYAWNWIRQPPGKKLEWIGYISNSGSTSYNPSLKSRVTISRDTSKNQFSLKLSSVTAADTAVYYCARERNYDYDDLYYAMDYWGQGTLVTVSS

SEQ ID NO: 1644 - protein, 124 aa, synthetic construct
  source 1..124: note = STEAP-A[STEAP1]_H1.178
QVQVQESGPGLVKPSQTLSLTCTVSGYSITSDYAWNWIRQPPGKKLEWIGYISNSGSTSYNPSLKSRVTISRDTSKNQFSLKLSSVTAADTAVYYCARERNYDYDDQYYAMDYWGQGTLVTVSS

SEQ ID NO: 1645 - protein, 124 aa, synthetic construct
  source 1..124: note = STEAP-A[STEAP1]_H1.179
QVQVQESGPGLVKPSQTLSLTCTVSGYSITSDYAWNWIRQPPGKKLEWIGYISNSGSTSYNPSLKSRVTISRDTSKNQFSLKLSSVTAADTAVYYCARERNYDYDDVYYAMDYWGQGTLVTVSS

SEQ ID NO: 1646 - protein, 124 aa, synthetic construct
  source 1..124: note = STEAP-A[STEAP1]_H1.180
QVQVQESGPGLVKPSQTLSLTCTVSGYSITSDYAWNWIRQPPGKKLEWIGYISNSGSTSYNPSLKSRVTISRDTSKNQFSLKLSSVTAADTAVYYCARERNYDYDDYAYAMDYWGQGTLVTVSS

SEQ ID NO: 1647 - protein, 124 aa, synthetic construct
  source 1..124: note = STEAP-A[STEAP1]_H1.181
QVQVQESGPGLVKPSQTLSLTCTVSGYSITSDYAWNWIRQPPGKKLEWIGYISNSGSTSYNPSLKSRVTISRDTSKNQFSLKLSSVTAADTAVYYCARERNYDYDDYFYAMDYWGQGTLVTVSS

SEQ ID NO: 1648 - protein, 124 aa, synthetic construct
  source 1..124: note = STEAP-A[STEAP1]_H1.182
QVQVQESGPGLVKPSQTLSLTCTVSGYSITSDYAWNWIRQPPGKKLEWIGYISNSGSTSYNPSLKSRVTISRDTSKNQFSLKLSSVTAADTAVYYCARERNYDYDDYHYAMDYWGQGTLVTVSS

SEQ ID NO: 1649 - protein, 124 aa, synthetic construct
  source 1..124: note = STEAP-A[STEAP1]_H1.183
QVQVQESGPGLVKPSQTLSLTCTVSGYSITSDYAWNWIRQPPGKKLEWIGYISNSGSTSYNPSLKSRVTISRDTSKNQFSLKLSSVTAADTAVYYCARERNYDYDDYKYAMDYWGQGTLVTVSS

SEQ ID NO: 1650 - protein, 124 aa, synthetic construct
  source 1..124: note = STEAP-A[STEAP1]_H1.184
QVQVQESGPGLVKPSQTLSLTCTVSGYSITSDYAWNWIRQPPGKKLEWIGYISNSGSTSYNPSLKSRVTISRDTSKNQFSLKLSSVTAADTAVYYCARERNYDYDDYLYAMDYWGQGTLVTVSS

SEQ ID NO: 1651 - protein, 124 aa, synthetic construct
  source 1..124: note = STEAP-A[STEAP1]_H1.185
QVQVQESGPGLVKPSQTLSLTCTVSGYSITSDYAWNWIRQPPGKKLEWIGYISNSGSTSYNPSLKSRVTISRDTSKNQFSLKLSSVTAADTAVYYCARERNYDYDDYQYAMDYWGQGTLVTVSS

SEQ ID NO: 1652 - protein, 124 aa, synthetic construct
  source 1..124: note = STEAP-A[STEAP1]_H1.186
QVQVQESGPGLVKPSQTLSLTCTVSGYSITSDYAWNWIRQPPGKKLEWIGYISNSGSTSYNPSLKSRVTISRDTSKNQFSLKLSSVTAADTAVYYCARERNYDYDDYVYAMDYWGQGTLVTVSS

SEQ ID NO: 1653 - protein, 124 aa, synthetic construct; identical to SEQ ID NO: 1550
  source 1..124: note = STEAP-A[STEAP1]_H1.187

SEQ ID NO: 1654 - protein, 124 aa, synthetic construct; identical to SEQ ID NO: 1551
  source 1..124: note = STEAP-A[STEAP1]_H1.188

SEQ ID NO: 1655 - protein, 124 aa, synthetic construct; identical to SEQ ID NO: 1552
  source 1..124: note = STEAP-A[STEAP1]_H1.189

SEQ ID NO: 1656 - protein, 124 aa, synthetic construct
  source 1..124: note = STEAP-A[STEAP1]_H1.190
QVQVQESGPGLVKPSQTLSLTCTVSGYSITSDYAWNWIRQPPGKKLEWIGYISNSGSTSYNPSLKSRVTISRDTSKNQFSLKLSSVTAADTAVYYCARERNYDYSAYYYAMDYWGQGTLVTVSS

SEQ ID NO: 1657 - protein, 124 aa, synthetic construct
  source 1..124: note = STEAP-A[STEAP1]_H1.191
QVQVQESGPGLVKPSQTLSLTCTVSGYSITSDYAWNWIRQPPGKKLEWIGYISNSGSTSYNPSLKSRVTISRDTSKNQFSLKLSSVTAADTAVYYCARERNYDYSLYYYAMDYWGQGTLVTVSS

SEQ ID NO: 1658 - protein, 124 aa, synthetic construct
  source 1..124: note = STEAP-A[STEAP1]_H1.192
QVQVQESGPGLVKPSQTLSLTCTVSGYSITSDYAWNWIRQPPGKKLEWIGYISNSGSTSYNPSLKSRVTISRDTSKNQFSLKLSSVTAADTAVYYCARERNYDYSVYYYAMDYWGQGTLVTVSS

SEQ ID NO: 1659 - protein, 124 aa, synthetic construct
  source 1..124: note = STEAP-A[STEAP1]_H1.195
QVQVQESGPGLVKPSQTLSLTCTVSGYSITSDYAWNWIRQPPGKKLEWIGYIGNSGSTSYNPSLKSRVTISRDTSKNQFSLKLSSVTAADTAVYYCARERNYDYELYYYAMDYWGQGTLVTVSS

SEQ ID NO: 1660 - protein, 124 aa, synthetic construct
  source 1..124: note = STEAP-A[STEAP1]_H1.196
QVQVQESGPGLVKPSQTLSLTCTVSGYSITSDYAWNWIRQPPGKKLEWIGYISNSGSTVYNPSLKSRVTISRDTSKNQFSLKLSSVTAADTAVYYCARERNYDYELYYYAMDYWGQGTLVTVSS

SEQ ID NO: 1661 - protein, 124 aa, synthetic construct
  source 1..124: note = STEAP-A[STEAP1]_H1.197
QVQVQESGPGLVKPSQTLSLTCTVSGYSITSDYAWNWIRQPPGKKLEWIGYISNHGSTSYNPSLKSRVTISRDTSKNQFSLKLSSVTAADTAVYYCARERNYDYELYYYAMDYWGQGTLVTVSS

SEQ ID NO: 1662 - protein, 124 aa, synthetic construct
  source 1..124: note = STEAP-A[STEAP1]_H1.198
QVQVQESGPGLVKPSQTLSLTCTVSGYSITSDYAWNWIRQPPGKKLEWIGYISNSGYTSYNPSLKSRVTISRDTSKNQFSLKLSSVTAADTAVYYCARERNYDYELYYYAMDYWGQGTLVTVSS

SEQ ID NO: 1663 - protein, 124 aa, synthetic construct
  source 1..124: note = STEAP-A[STEAP1]_H1.199
QVQVQESGPGLVKPSQTLSLTCTVSGYSITSDYAWNWIRQPPGKKLEWIGYISNSGSKSYNPSLKSRVTISRDTSKNQFSLKLSSVTAADTAVYYCARERNYDYELYYYAMDYWGQGTLVTVSS

SEQ ID NO: 1664 - protein, 124 aa, synthetic construct
  source 1..124: note = STEAP-A[STEAP1]_H1.200
QVQVQESGPGLVKPSQTLSLTCTVSGYSITSDYAWNWIRQPPGKKLEWIGYISNSGSTAYNPSLKSRVTISRDTSKNQFSLKLSSVTAADTAVYYCARERNYDYELYYYAMDYWGQGTLVTVSS

SEQ ID NO: 1665 - protein, 124 aa, synthetic construct
  source 1..124: note = STEAP-A[STEAP1]_H1.201
QVQVQESGPGLVKPSQTLSLTCTVSGYSITSTYAWNWIRQPPGKKLEWIGYISNSGSTSYNPSLKSRVTISRDTSKNQFSLKLSSVTAADTAVYYCARERNYDYELYYYAMDYWGQGTLVTVSS

SEQ ID NO: 1666 - protein, 124 aa, synthetic construct
  source 1..124: note = STEAP-A[STEAP1]_H1.202
QVQVQESGPGLVKPSQTLSLTCTVSGYSITSDYSWNWIRQPPGKKLEWIGYISNSGSTSYNPSLKSRVTISRDTSKNQFSLKLSSVTAADTAVYYCARERNYDYELYYYAMDYWGQGTLVTVSS

SEQ ID NO: 1667 - protein, 124 aa, synthetic construct
  source 1..124: note = STEAP-A[STEAP1]_H1.203
QVQVQESGPGLVKPSQTLSLTCTVSGYSITSDYAWNWIRQPPGKKLEWIGYISHSGSTSYNPSLKSRVTISRDTSKNQFSLKLSSVTAADTAVYYCARERNYDYELYYYAMDYWGQGTLVTVSS

SEQ ID NO: 1668 - protein, 124 aa, synthetic construct
  source 1..124: note = STEAP-A[STEAP1]_H1.204
QVQVQESGPGLVKPSQTLSLTCTVSGYSITSDYAWNWIRQPPGKKLEWIGYISNGGSTSYNPSLKSRVTISRDTSKNQFSLKLSSVTAADTAVYYCARERNYDYELYYYAMDYWGQGTLVTVSS

SEQ ID NO: 1669 - protein, 124 aa, synthetic construct
  source 1..124: note = STEAP-A[STEAP1]_H1.205
QVQVQESGPGLVKPSQTLSLTCTVSGYSITSDYAWNWIRQPPGKKLEWIGYIGNSGSTVYNPSLKSRVTISRDTSKNQFSLKLSSVTAADTAVYYCARERNYDYELYYYAMDYWGQGTLVTVSS

SEQ ID NO: 1670 - protein, 124 aa, synthetic construct
  source 1..124: note = STEAP-A[STEAP1]_H1.206
QVQVQESGPGLVKPSQTLSLTCTVSGYSITSTYAWNWIRQPPGKKLEWIGYIGNSGSTSYNPSLKSRVTISRDTSKNQFSLKLSSVTAADTAVYYCARERNYDYELYYYAMDYWGQGTLVTVSS

SEQ ID NO: 1671 - protein, 124 aa, synthetic construct
  source 1..124: note = STEAP-A[STEAP1]_H1.207
QVQVQESGPGLVKPSQTLSLTCTVSGYSITSDYSWNWIRQPPGKKLEWIGYIGNSGSTSYNPSLKSRVTISRDTSKNQFSLKLSSVTAADTAVYYCARERNYDYELYYYAMDYWGQGTLVTVSS

SEQ ID NO: 1672 - protein, 124 aa, synthetic construct
  source 1..124: note = STEAP-A[STEAP1]_H1.208
QVQVQESGPGLVKPSQTLSLTCTVSGYSITSDYAWNWIRQPPGKKLEWIGYIGHSGSTSYNPSLKSRVTISRDTSKNQFSLKLSSVTAADTAVYYCARERNYDYELYYYAMDYWGQGTLVTVSS

SEQ ID NO: 1673 - protein, 124 aa, synthetic construct
  source 1..124: note = STEAP-A[STEAP1]_H1.209
QVQVQESGPGLVKPSQTLSLTCTVSGYSITSDYAWNWIRQPPGKKLEWIGYIGNGGSTSYNPSLKSRVTISRDTSKNQFSLKLSSVTAADTAVYYCARERNYDYELYYYAMDYWGQGTLVTVSS

SEQ ID NO: 1674 - protein, 124 aa, synthetic construct
  source 1..124: note = STEAP-A[STEAP1]_H1.210
QVQVQESGPGLVKPSQTLSLTCTVSGYSITSDYAWNWIRQPPGKKLEWIGYIGNHGSTSYNPSLKSRVTISRDTSKNQFSLKLSSVTAADTAVYYCARERNYDYELYYYAMDYWGQGTLVTVSS

SEQ ID NO: 1675 - protein, 124 aa, synthetic construct
  source 1..124: note = STEAP-A[STEAP1]_H1.211
QVQVQESGPGLVKPSQTLSLTCTVSGYSITSDYAWNWIRQPPGKKLEWIGYIGNSGYTSYNPSLKSRVTISRDTSKNQFSLKLSSVTAADTAVYYCARERNYDYELYYYAMDYWGQGTLVTVSS

SEQ ID NO: 1676 - protein, 124 aa, synthetic construct
  source 1..124: note = STEAP-A[STEAP1]_H1.212
QVQVQESGPGLVKPSQTLSLTCTVSGYSITSDYAWNWIRQPPGKKLEWIGYIGNSGSKSYNPSLKSRVTISRDTSKNQFSLKLSSVTAADTAVYYCARERNYDYELYYYAMDYWGQGTLVTVSS

SEQ ID NO: 1677 - protein, 124 aa, synthetic construct
  source 1..124: note = STEAP-A[STEAP1]_H1.213
QVQVQESGPGLVKPSQTLSLTCTVSGYSITSDYAWNWIRQPPGKKLEWIGYIGNSGSTAYNPSLKSRVTISRDTSKNQFSLKLSSVTAADTAVYYCARERNYDYELYYYAMDYWGQGTLVTVSS

SEQ ID NO: 1678 - protein, 124 aa, synthetic construct
  source 1..124: note = STEAP-A[STEAP1]_H1.214
QVQVQESGPGLVKPSQTLSLTCTVSGYSITSTYAWNWIRQPPGKKLEWIGYISNSGSTVYNPSLKSRVTISRDTSKNQFSLKLSSVTAADTAVYYCARERNYDYELYYYAMDYWGQGTLVTVSS

SEQ ID NO: 1679 - protein, 124 aa, synthetic construct
  source 1..124: note = STEAP-A[STEAP1]_H1.215
QVQVQESGPGLVKPSQTLSLTCTVSGYSITSDYSWNWIRQPPGKKLEWIGYISNSGSTVYNPSLKSRVTISRDTSKNQFSLKLSSVTAADTAVYYCARERNYDYELYYYAMDYWGQGTLVTVSS

SEQ ID NO: 1680 - protein, 124 aa, synthetic construct
  source 1..124: note = STEAP-A[STEAP1]_H1.216
QVQVQESGPGLVKPSQTLSLTCTVSGYSITSDYAWNWIRQPPGKKLEWIGYISHSGSTVYNPSLKSRVTISRDTSKNQFSLKLSSVTAADTAVYYCARERNYDYELYYYAMDYWGQGTLVTVSS

SEQ ID NO: 1681 - protein, 124 aa, synthetic construct
  source 1..124: note = STEAP-A[STEAP1]_H1.217
QVQVQESGPGLVKPSQTLSLTCTVSGYSITSDYAWNWIRQPPGKKLEWIGYISNGGSTVYNPSLKSRVTISRDTSKNQFSLKLSSVTAADTAVYYCARERNYDYELYYYAMDYWGQGTLVTVSS

SEQ ID NO: 1682 - protein, 124 aa, synthetic construct
  source 1..124: note = STEAP-A[STEAP1]_H1.218
QVQVQESGPGLVKPSQTLSLTCTVSGYSITSDYAWNWIRQPPGKKLEWIGYISNHGSTVYNPSLKSRVTISRDTSKNQFSLKLSSVTAADTAVYYCARERNYDYELYYYAMDYWGQGTLVTVSS

SEQ ID NO: 1683 - protein, 124 aa, synthetic construct
  source 1..124: note = STEAP-A[STEAP1]_H1.219
QVQVQESGPGLVKPSQTLSLTCTVSGYSITSDYAWNWIRQPPGKKLEWIGYISNSGYTVYNPSLKSRVTISRDTSKNQFSLKLSSVTAADTAVYYCARERNYDYELYYYAMDYWGQGTLVTVSS

SEQ ID NO: 1684 - protein, 124 aa, synthetic construct
  source 1..124: note = STEAP-A[STEAP1]_H1.220
QVQVQESGPGLVKPSQTLSLTCTVSGYSITSDYAWNWIRQPPGKKLEWIGYISNSGSKVYNPSLKSRVTISRDTSKNQFSLKLSSVTAADTAVYYCARERNYDYELYYYAMDYWGQGTLVTVSS

SEQ ID NO: 1685 - protein, 124 aa, synthetic construct
  source 1..124: note = STEAP-A[STEAP1]_H1.221
QVQVQESGPGLVKPSQTLSLTCTVSGYSITSDYAWNWIRQPPGKKLEWIGYISNHGYTSYNPSLKSRVTISRDTSKNQFSLKLSSVTAADTAVYYCARERNYDYELYYYAMDYWGQGTLVTVSS

SEQ ID NO: 1686 - protein, 124 aa, synthetic construct
  source 1..124: note = STEAP-A[STEAP1]_H1.222
QVQVQESGPGLVKPSQTLSLTCTVSGYSITSDYAWNWIRQPPGKKLEWIGYISNHGSKSYNPSLKSRVTISRDTSKNQFSLKLSSVTAADTAVYYCARERNYDYELYYYAMDYWGQGTLVTVSS

SEQ ID NO: 1687 - protein, 124 aa, synthetic construct
  source 1..124: note = STEAP-A[STEAP1]_H1.223
QVQVQESGPGLVKPSQTLSLTCTVSGYSITSDYAWNWIRQPPGKKLEWIGYISNHGSTAYNPSLKSRVTISRDTSKNQFSLKLSSVTAADTAVYYCARERNYDYELYYYAMDYWGQGTLVTVSS

SEQ ID NO: 1688 - protein, 124 aa, synthetic construct
  source 1..124: note = STEAP-A[STEAP1]_H1.224
QVQVQESGPGLVKPSQTLSLTCTVSGYSITSDYAWNWIRQPPGKKLEWIGYISNSGYKSYNPSLKSRVTISRDTSKNQFSLKLSSVTAADTAVYYCARERNYDYELYYYAMDYWGQGTLVTVSS

SEQ ID NO: 1689 - protein, 124 aa, synthetic construct
  source 1..124: note = STEAP-A[STEAP1]_H1.225
QVQVQESGPGLVKPSQTLSLTCTVSGYSITSDYAWNWIRQPPGKKLEWIGYISNSGYTAYNPSLKSRVTISRDTSKNQFSLKLSSVTAADTAVYYCARERNYDYELYYYAMDYWGQGTLVTVSS

SEQ ID NO: 1690 - protein, 124 aa, synthetic construct
  source 1..124: note = STEAP-A[STEAP1]_H1.226
QVQVQESGPGLVKPSQTLSLTCTVSGYSITSDYAWNWIRQPPGKKLEWIGYISNSGSKAYNPSLKSRVTISRDTSKNQFSLKLSSVTAADTAVYYCARERNYDYELYYYAMDYWGQGTLVTVSS

SEQ ID NO: 1691 - protein, 124 aa, synthetic construct
  source 1..124: note = STEAP-A[STEAP1]_H1.227
QVQVQESGPGLVKPSQTLSLTCTVSGYSITSTYAWNWIRQPPGKKLEWIGYIGNSGSTVYNPSLKSRVTISRDTSKNQFSLKLSSVTAADTAVYYCARERNYDYELYYYAMDYWGQGTLVTVSS

SEQ ID NO: 1692 - protein, 124 aa, synthetic construct
  source 1..124: note = STEAP-A[STEAP1]_H1.228
QVQVQESGPGLVKPSQTLSLTCTVSGYSITSDYSWNWIRQPPGKKLEWIGYIGNSGSTVYNPSLKSRVTISRDTSKNQFSLKLSSVTAADTAVYYCARERNYDYELYYYAMDYWGQGTLVTVSS

SEQ ID NO: 1693 - protein, 124 aa, synthetic construct
  source 1..124: note = STEAP-A[STEAP1]_H1.229
QVQVQESGPGLVKPSQTLSLTCTVSGYSITSDYSWNWIRQPPGKKLEWIGYIGESGSTVYNPSLKSRVTISRDTSKNQFSLKLSSVTAADTAVYYCARERNYDYELYYYAMDYWGQGTLVTVSS

SEQ ID NO: 1694 - protein, 124 aa, synthetic construct
  source 1..124: note = STEAP-A[STEAP1]_H1.230
QVQVQESGPGLVKPSQTLSLTCTVSGYSITSDYSWNWIRQPPGKKLEWIGYIGTSGSTVYNPSLKSRVTISRDTSKNQFSLKLSSVTAADTAVYYCARERNYDYELYYYAMDYWGQGTLVTVSS

SEQ ID NO: 1695 - protein, 124 aa, synthetic construct
  source 1..124: note = STEAP-A[STEAP1]_H1.231
QVQVQESGPGLVKPSQTLSLTCTVSGYSITSDYSWNWIRQPPGKKLEWIGYIGNQGSTVYNPSLKSRVTISRDTSKNQFSLKLSSVTAADTAVYYCARERNYDYELYYYAMDYWGQGTLVTVSS

SEQ ID NO: 1696 - protein, 124 aa, synthetic construct
  source 1..124: note = STEAP-A[STEAP1]_H1.232
QVQVQESGPGLVKPSQTLSLTCTVSGYSITSDYSWNWIRQPPGKKLEWIGYIGNTGSTVYNPSLKSRVTISRDTSKNQFSLKLSSVTAADTAVYYCARERNYDYELYYYAMDYWGQGTLVTVSS

SEQ ID NO: 1697 - protein, 113 aa, synthetic construct
  source 1..113: note = STEAP-A[STEAP1]_L1.1
DIVMTQSPDSLAVSLGERATINCKSSQSLLYRSNQKNYLAWYQQKPGQPPKLLIYWASTRESGVPDRFTGSGSGTDFTLTISSLQAEDVAVYYCQQYYNYPRTFGGGTKVEIK

SEQ ID NO: 1698 - protein, 113 aa, synthetic construct
  source 1..113: note = STEAP-A[STEAP1]_L1.2
DIVMTQSPDSLAVSLGERATINCKSSQSLLYRSNQKNYLAWYQQKPGQSPKLLIYWASTRESGVPDRFSGSGSGTDFTLTISSLQAEDVAVYYCQQYYNYPRTFGGGTKVEIK

SEQ ID NO: 1699 - protein, 113 aa, synthetic construct
  source 1..113: note = STEAP-A[STEAP1]_L1.3
DIVMTQSPDSLAVSLGERATINCKSSQSLLYRSNQKNYLAWYQQKPGQPPKLLIYWASTRESGVPDRFSGSGSGTDFTLTISSLQAEDVAVYYCQQYYNYPRTFGGGTKVEIK

SEQ ID NO: 1700 - protein, 113 aa, synthetic construct
  source 1..113: note = STEAP-A[STEAP1]_L1.4
DIVMTQSPDSLAVSLGERATINCKSSQALLYRSNQKNYLAWYQQKPGQSPKLLIYWASTRESGVPDRFTGSGSGTDFTLTISSLQAEDVAVYYCQQYYNYPRTFGGGTKVEIK

SEQ ID NO: 1701 - protein, 113 aa, synthetic construct
  source 1..113: note = STEAP-A[STEAP1]_L1.5
DIVMTQSPDSLAVSLGERATINCKSSQDLLYRSNQKNYLAWYQQKPGQSPKLLIYWASTRESGVPDRFTGSGSGTDFTLTISSLQAEDVAVYYCQQYYNYPRTFGGGTKVEIK

SEQ ID NO: 1702 - protein, 113 aa, synthetic construct
  source 1..113: note = STEAP-A[STEAP1]_L1.6
DIVMTQSPDSLAVSLGERATINCKSSQGLLYRSNQKNYLAWYQQKPGQSPKLLIYWASTRESGVPDRFTGSGSGTDFTLTISSLQAEDVAVYYCQQYYNYPRTFGGGTKVEIK

SEQ ID NO: 1703 - protein, 113 aa, synthetic construct
  source 1..113: note = STEAP-A[STEAP1]_L1.7
DIVMTQSPDSLAVSLGERATINCKSSQHLLYRSNQKNYLAWYQQKPGQSPKLLIYWASTRESGVPDRFTGSGSGTDFTLTISSLQAEDVAVYYCQQYYNYPRTFGGGTKVEIK

SEQ ID NO: 1704 - protein, 113 aa, synthetic construct
  source 1..113: note = STEAP-A[STEAP1]_L1.8
DIVMTQSPDSLAVSLGERATINCKSSQKLLYRSNQKNYLAWYQQKPGQSPKLLIYWASTRESGVPDRFTGSGSGTDFTLTISSLQAEDVAVYYCQQYYNYPRTFGGGTKVEIK

SEQ ID NO: 1705 - protein, 113 aa, synthetic construct
  source 1..113: note = STEAP-A[STEAP1]_L1.9
DIVMTQSPDSLAVSLGERATINCKSSQQLLYRSNQKNYLAWYQQKPGQSPKLLIYWASTRESGVPDRFTGSGSGTDFTLTISSLQAEDVAVYYCQQYYNYPRTFGGGTKVEIK

SEQ ID NO: 1706 - protein, 113 aa, synthetic construct
  source 1..113: note = STEAP-A[STEAP1]_L1.10
DIVMTQSPDSLAVSLGERATINCKSSQTLLYRSNQKNYLAWYQQKPGQSPKLLIYWASTRESGVPDRFTGSGSGTDFTLTISSLQAEDVAVYYCQQYYNYPRTFGGGTKVEIK

SEQ ID NO: 1707 - protein, 113 aa, synthetic construct
  source 1..113: note = STEAP-A[STEAP1]_L1.11
DIVMTQSPDSLAVSLGERATINCKSSQVLLYRSNQKNYLAWYQQKPGQSPKLLIYWASTRESGVPDRFTGSGSGTDFTLTISSLQAEDVAVYYCQQYYNYPRTFGGGTKVEIK

SEQ ID NO: 1708 - protein, 113 aa, synthetic construct
  source 1..113: note = STEAP-A[STEAP1]_L1.12
DIVMTQSPDSLAVSLGERATINCKSSQYLLYRSNQKNYLAWYQQKPGQSPKLLIYWASTRESGVPDRFTGSGSGTDFTLTISSLQAEDVAVYYCQQYYNYPRTFGGGTKVEIK

SEQ ID NO: 1709 - protein, 113 aa, synthetic construct
  source 1..113: note = STEAP-A[STEAP1]_L1.13
DIVMTQSPDSLAVSLGERATINCKSSQSLLERSNQKNYLAWYQQKPGQSPKLLIYWASTRESGVPDRFTGSGSGTDFTLTISSLQAEDVAVYYCQQYYNYPRTFGGGTKVEIK

SEQ ID NO: 1710 - protein, 113 aa, synthetic construct
  source 1..113: note = STEAP-A[STEAP1]_L1.14
DIVMTQSPDSLAVSLGERATINCKSSQSLLFRSNQKNYLAWYQQKPGQSPKLLIYWASTRESGVPDRFTGSGSGTDFTLTISSLQAEDVAVYYCQQYYNYPRTFGGGTKVEIK

SEQ ID NO: 1711 - protein, 113 aa, synthetic construct
  source 1..113: note = STEAP-A[STEAP1]_L1.15
DIVMTQSPDSLAVSLGERATINCKSSQSLLHRSNQKNYLAWYQQKPGQSPKLLIYWASTRESGVPDRFTGSGSGTDFTLTISSLQAEDVAVYYCQQYYNYPRTFGGGTKVEIK

SEQ ID NO: 1712 - protein, 113 aa, synthetic construct
  source 1..113: note = STEAP-A[STEAP1]_L1.16
DIVMTQSPDSLAVSLGERATINCKSSQSLLQRSNQKNYLAWYQQKPGQSPKLLIYWASTRESGVPDRFTGSGSGTDFTLTISSLQAEDVAVYYCQQYYNYPRTFGGGTKVEIK

SEQ ID NO: 1713 - protein, 113 aa, synthetic construct
  source 1..113: note = STEAP-A[STEAP1]_L1.17
DIVMTQSPDSLAVSLGERATINCKSSQSLLRRSNQKNYLAWYQQKPGQSPKLLIYWASTRESGVPDRFTGSGSGTDFTLTISSLQAEDVAVYYCQQYYNYPRTFGGGTKVEIK

SEQ ID NO: 1714 - protein, 113 aa, synthetic construct
  source 1..113: note = STEAP-A[STEAP1]_L1.18
DIVMTQSPDSLAVSLGERATINCKSSQSLLYESNQKNYLAWYQQKPGQSPKLLIYWASTRESGVPDRFTGSGSGTDFTLTISSLQAEDVAVYYCQQYYNYPRTFGGGTKVEIK

SEQ ID NO: 1715 - protein, 113 aa, synthetic construct
  source 1..113: note = STEAP-A[STEAP1]_L1.19
DIVMTQSPDSLAVSLGERATINCKSSQSLLYKSNQKNYLAWYQQKPGQSPKLLIYWASTRESGVPDRFTGSGSGTDFTLTISSLQAEDVAVYYCQQYYNYPRTFGGGTKVEIK

SEQ ID NO: 1716 - protein, 113 aa, synthetic construct
  source 1..113: note = STEAP-A[STEAP1]_L1.20
DIVMTQSPDSLAVSLGERATINCKSSQSLLYLSNQKNYLAWYQQKPGQSPKLLIYWASTRESGVPDRFTGSGSGTDFTLTISSLQAEDVAVYYCQQYYNYPRTFGGGTKVEIK

SEQ ID NO: 1717 - protein, 113 aa, synthetic construct
  source 1..113: note = STEAP-A[STEAP1]_L1.21
DIVMTQSPDSLAVSLGERATINCKSSQSLLYQSNQKNYLAWYQQKPGQSPKLLIYWASTRESGVPDRFTGSGSGTDFTLTISSLQAEDVAVYYCQQYYNYPRTFGGGTKVEIK

SEQ ID NO: 1718 - protein, 113 aa, synthetic construct
  source 1..113: note = STEAP-A[STEAP1]_L1.22
DIVMTQSPDSLAVSLGERATINCKSSQSLLYSSNQKNYLAWYQQKPGQSPKLLIYWASTRESGVPDRFTGSGSGTDFTLTISSLQAEDVAVYYCQQYYNYPRTFGGGTKVEIK

SEQ ID NO: 1719 - protein, 113 aa, synthetic construct
  source 1..113: note = STEAP-A[STEAP1]_L1.23
DIVMTQSPDSLAVSLGERATINCKSSQSLLYRDNQKNYLAWYQQKPGQSPKLLIYWASTRESGVPDRFTGSGSGTDFTLTISSLQAEDVAVYYCQQYYNYPRTFGGGTKVEIK

SEQ ID NO: 1720 - protein, 113 aa, synthetic construct
  source 1..113: note = STEAP-A[STEAP1]_L1.24
DIVMTQSPDSLAVSLGERATINCKSSQSLLYRENQKNYLAWYQQKPGQSPKLLIYWASTRESGVPDRFTGSGSGTDFTLTISSLQAEDVAVYYCQQYYNYPRTFGGGTKVEIK

SEQ ID NO: 1721 - protein, 113 aa, synthetic construct
  source 1..113: note = STEAP-A[STEAP1]_L1.25
DIVMTQSPDSLAVSLGERATINCKSSQSLLYRHNQKNYLAWYQQKPGQSPKLLIYWASTRESGVPDRFTGSGSGTDFTLTISSLQAEDVAVYYCQQYYNYPRTFGGGTKVEIK

SEQ ID NO: 1722 - protein, 113 aa, synthetic construct
  source 1..113: note = STEAP-A[STEAP1]_L1.26
DIVMTQSPDSLAVSLGERATINCKSSQSLLYRINQKNYLAWYQQKPGQSPKLLIYWASTRESGVPDRFTGSGSGTDFTLTISSLQAEDVAVYYCQQYYNYPRTFGGGTKVEIK

SEQ ID NO: 1723 - protein, 113 aa, synthetic construct
  source 1..113: note = STEAP-A[STEAP1]_L1.27
DIVMTQSPDSLAVSLGERATINCKSSQSLLYRKNQKNYLAWYQQKPGQSPKLLIYWASTRESGVPDRFTGSGSGTDFTLTISSLQAEDVAVYYCQQYYNYPRTFGGGTKVEIK

SEQ ID NO: 1724 - protein, 113 aa, synthetic construct
  source 1..113: note = STEAP-A[STEAP1]_L1.28
DIVMTQSPDSLAVSLGERATINCKSSQSLLYRLNQKNYLAWYQQKPGQSPKLLIYWASTRESGVPDRFTGSGSGTDFTLTISSLQAEDVAVYYCQQYYNYPRTFGGGTKVEIK

SEQ ID NO: 1725 - protein, 113 aa, synthetic construct
  source 1..113: note = STEAP-A[STEAP1]_L1.29
DIVMTQSPDSLAVSLGERATINCKSSQSLLYRQNQKNYLAWYQQKPGQSPKLLIYWASTRESGVPDRFTGSGSGTDFTLTISSLQAEDVAVYYCQQYYNYPRTFGGGTKVEIK

SEQ ID NO: 1726 - protein, 113 aa, synthetic construct
  source 1..113: note = STEAP-A[STEAP1]_L1.30
DIVMTQSPDSLAVSLGERATINCKSSQSLLYRTNQKNYLAWYQQKPGQSPKLLIYWASTRESGVPDRFTGSGSGTDFTLTISSLQAEDVAVYYCQQYYNYPRTFGGGTKVEIK

SEQ ID NO: 1727 - protein, 113 aa, synthetic construct
  source 1..113: note = STEAP-A[STEAP1]_L1.31
DIVMTQSPDSLAVSLGERATINCKSSQSLLYRYNQKNYLAWYQQKPGQSPKLLIYWASTRESGVPDRFTGSGSGTDFTLTISSLQAEDVAVYYCQQYYNYPRTFGGGTKVEIK

SEQ ID NO: 1728 - protein, 113 aa, synthetic construct
  source 1..113: note = STEAP-A[STEAP1]_L1.32
DIVMTQSPDSLAVSLGERATINCKSSQSLLYRSDQKNYLAWYQQKPGQSPKLLIYWASTRESGVPDRFTGSGSGTDFTLTISSLQAEDVAVYYCQQYYNYPRTFGGGTKVEIK

SEQ ID NO: 1729 - protein, 113 aa, synthetic construct
  source 1..113: note = STEAP-A[STEAP1]_L1.33
DIVMTQSPDSLAVSLGERATINCKSSQSLLYRSIQKNYLAWYQQKPGQSPKLLIYWASTRESGVPDRFTGSGSGTDFTLTISSLQAEDVAVYYCQQYYNYPRTFGGGTKVEIK

SEQ ID NO: 1730 - protein, 113 aa, synthetic construct
  source 1..113: note = STEAP-A[STEAP1]_L1.34
DIVMTQSPDSLAVSLGERATINCKSSQSLLYRSKQKNYLAWYQQKPGQSPKLLIYWASTRESGVPDRFTGSGSGTDFTLTISSLQAEDVAVYYCQQYYNYPRTFGGGTKVEIK

SEQ ID NO: 1731 - protein, 113 aa, synthetic construct
  source 1..113: note = STEAP-A[STEAP1]_L1.35
DIVMTQSPDSLAVSLGERATINCKSSQSLLYRSLQKNYLAWYQQKPGQSPKLLIYWASTRESGVPDRFTGSGSGTDFTLTISSLQAEDVAVYYCQQYYNYPRTFGGGTKVEIK

SEQ ID NO: 1732 - protein, 113 aa, synthetic construct
  source 1..113: note = STEAP-A[STEAP1]_L1.36
DIVMTQSPDSLAVSLGERATINCKSSQSLLYRSQQKNYLAWYQQKPGQSPKLLIYWASTRESGVPDRFTGSGSGTDFTLTISSLQAEDVAVYYCQQYYNYPRTFGGGTKVEIK

SEQ ID NO: 1733 - protein, 113 aa, synthetic construct
  source 1..113: note = STEAP-A[STEAP1]_L1.37
DIVMTQSPDSLAVSLGERATINCKSSQSLLYRSRQKNYLAWYQQKPGQSPKLLIYWASTRESGVPDRFTGSGSGTDFTLTISSLQAEDVAVYYCQQYYNYPRTFGGGTKVEIK

SEQ ID NO: 1734 - protein, 113 aa, synthetic construct
  source 1..113: note = STEAP-A[STEAP1]_L1.38
DIVMTQSPDSLAVSLGERATINCKSSQSLLYRSSQKNYLAWYQQKPGQSPKLLIYWASTRESGVPDRFTGSGSGTDFTLTISSLQAEDVAVYYCQQYYNYPRTFGGGTKVEIK

SEQ ID NO: 1735 - protein, 113 aa, synthetic construct
  source 1..113: note = STEAP-A[STEAP1]_L1.39
DIVMTQSPDSLAVSLGERATINCKSSQSLLYRSTQKNYLAWYQQKPGQSPKLLIYWASTRESGVPDRFTGSGSGTDFTLTISSLQAEDVAVYYCQQYYNYPRTFGGGTKVEIK

SEQ ID NO: 1736 - protein, 113 aa, synthetic construct
  source 1..113: note = STEAP-A[STEAP1]_L1.40
DIVMTQSPDSLAVSLGERATINCKSSQSLLYRSYQKNYLAWYQQKPGQSPKLLIYWASTRESGVPDRFTGSGSGTDFTLTISSLQAEDVAVYYCQQYYNYPRTFGGGTKVEIK

SEQ ID NO: 1737 - protein, 113 aa, synthetic construct
  source 1..113: note = STEAP-A[STEAP1]_L1.41
DIVMTQSPDSLAVSLGERATINCKSSQSLLYRSNEKNYLAWYQQKPGQSPKLLIYWASTRESGVPDRFTGSGSGTDFTLTISSLQAEDVAVYYCQQYYNYPRTFGGGTKVEIK

SEQ ID NO: 1738 - protein, 113 aa, synthetic construct
  source 1..113: note = STEAP-A[STEAP1]_L1.42
DIVMTQSPDSLAVSLGERATINCKSSQSLLYRSNHKNYLAWYQQKPGQSPKLLIYWASTRESGVPDRFTGSGSGTDFTLTISSLQAEDVAVYYCQQYYNYPRTFGGGTKVEIK

SEQ ID NO: 1739 - protein, 113 aa, synthetic construct
  source 1..113: note = STEAP-A[STEAP1]_L1.43
DIVMTQSPDSLAVSLGERATINCKSSQSLLYRSNKKNYLAWYQQKPGQSPKLLIYWASTRESGVPDRFTGSGSGTDFTLTISSLQAEDVAVYYCQQYYNYPRTFGGGTKVEIK

SEQ ID NO: 1740 - protein, 113 aa, synthetic construct
  source 1..113: note = STEAP-A[STEAP1]_L1.44
DIVMTQSPDSLAVSLGERATINCKSSQSLLYRSNNKNYLAWYQQKPGQSPKLLIYWASTRESGVPDRFTGSGSGTDFTLTISSLQAEDVAVYYCQQYYNYPRTFGGGTKVEIK

SEQ ID NO: 1741 - protein, 113 aa, synthetic construct
  source 1..113: note = STEAP-A[STEAP1]_L1.45
DIVMTQSPDSLAVSLGERATINCKSSQSLLYRSNYKNYLAWYQQKPGQSPKLLIYWASTRESGVPDRFTGSGSGTDFTLTISSLQAEDVAVYYCQQYYNYPRTFGGGTKVEIK

SEQ ID NO: 1742 - protein, 113 aa, synthetic construct
  source 1..113: note = STEAP-A[STEAP1]_L1.46
DIVMTQSPDSLAVSLGERATINCKSSQSLLYRSNQQNYLAWYQQKPGQSPKLLIYWASTRESGVPDRFTGSGSGTDFTLTISSLQAEDVAVYYCQQYYNYPRTFGGGTKVEIK

SEQ ID NO: 1743 - protein, 113 aa, synthetic construct
  source 1..113: note = STEAP-A[STEAP1]_L1.47
DIVMTQSPDSLAVSLGERATINCKSSQSLLYRSNQRNYLAWYQQKPGQSPKLLIYWASTRESGVPDRFTGSGSGTDFTLTISSLQAEDVAVYYCQQYYNYPRTFGGGTKVEIK

SEQ ID NO: 1744 - protein, 113 aa, synthetic construct
  source 1..113: note = STEAP-A[STEAP1]_L1.48
DIVMTQSPDSLAVSLGERATINCKSSQSLLYRSNQSNYLAWYQQKPGQSPKLLIYWASTRESGVPDRFTGSGSGTDFTLTISSLQAEDVAVYYCQQYYNYPRTFGGGTKVEIK

SEQ ID NO: 1745 - protein, 113 aa, synthetic construct
  source 1..113: note = STEAP-A[STEAP1]_L1.49
DIVMTQSPDSLAVSLGERATINCKSSQSLLYRSNQKKYLAWYQQKPGQSPKLLIYWASTRESGVPDRFTGSGSGTDFTLTISSLQAEDVAVYYCQQYYNYPRTFGGGTKVEIK

SEQ ID NO: 1746 - protein, 113 aa, synthetic construct
  source 1..113: note = STEAP-A[STEAP1]_L1.50
DIVMTQSPDSLAVSLGERATINCKSSQSLLYRSNQKRYLAWYQQKPGQSPKLLIYWASTRESGVPDRFTGSGSGTDFTLTISSLQAEDVAVYYCQQYYNYPRTFGGGTKVEIK

SEQ ID NO: 1747 - protein, 113 aa, synthetic construct
  source 1..113: note = STEAP-A[STEAP1]_L1.51
DIVMTQSPDSLAVSLGERATINCKSSQSLLYRSNQKYYLAWYQQKPGQSPKLLIYWASTRESGVPDRFTGSGSGTDFTLTISSLQAEDVAVYYCQQYYNYPRTFGGGTKVEIK

SEQ ID NO: 1748 - protein, 113 aa, synthetic construct
  source 1..113: note = STEAP-A[STEAP1]_L1.52
DIVMTQSPDSLAVSLGERATINCKSSQSLLYRSNQKNYLAWYQQKPGQSPKLLIYWAETRESGVPDRFTGSGSGTDFTLTISSLQAEDVAVYYCQQYYNYPRTFGGGTKVEIK

SEQ ID NO: 1749 - protein, 113 aa, synthetic construct
  source 1..113: note = STEAP-A[STEAP1]_L1.53
DIVMTQSPDSLAVSLGERATINCKSSQSLLYRSNQKNYLAWYQQKPGQSPKLLIYWAKTRESGVPDRFTGSGSGTDFTLTISSLQAEDVAVYYCQQYYNYPRTFGGGTKVEIK

SEQ ID NO: 1750 - protein, 113 aa, synthetic construct
  source 1..113: note = STEAP-A[STEAP1]_L1.54
DIVMTQSPDSLAVSLGERATINCKSSQSLLYRSNQKNYLAWYQQKPGQSPKLLIYWALTRESGVPDRFTGSGSGTDFTLTISSLQAEDVAVYYCQQYYNYPRTFGGGTKVEIK

SEQ ID NO: 1751 - protein, 113 aa, synthetic construct
  source 1..113: note = STEAP-A[STEAP1]_L1.55
DIVMTQSPDSLAVSLGERATINCKSSQSLLYRSNQKNYLAWYQQKPGQSPKLLIYWAQTRESGVPDRFTGSGSGTDFTLTISSLQAEDVAVYYCQQYYNYPRTFGGGTKVEIK

SEQ ID NO: 1752 - protein, 113 aa, synthetic construct
  source 1..113: note = STEAP-A[STEAP1]_L1.56
DIVMTQSPDSLAVSLGERATINCKSSQSLLYRSNQKNYLAWYQQKPGQSPKLLIYWAYTRESGVPDRFTGSGSGTDFTLTISSLQAEDVAVYYCQQYYNYPRTFGGGTKVEIK

SEQ ID NO: 1753 - protein, 113 aa, synthetic construct
  source 1..113: note = STEAP-A[STEAP1]_L1.57
DIVMTQSPDSLAVSLGERATINCKSSQSLLYRSNQKNYLAWYQQKPGQSPKLLIYWASERESGVPDRFTGSGSGTDFTLTISSLQAEDVAVYYCQQYYNYPRTFGGGTKVEIK

SEQ ID NO: 1754 - protein, 113 aa, synthetic construct
  source 1..113: note = STEAP-A[STEAP1]_L1.58
DIVMTQSPDSLAVSLGERATINCKSSQSLLYRSNQKNYLAWYQQKPGQSPKLLIYWASKRESGVPDRFTGSGSGTDFTLTISSLQAEDVAVYYCQQYYNYPRTFGGGTKVEIK

SEQ ID NO: 1755 - protein, 113 aa, synthetic construct
  source 1..113: note = STEAP-A[STEAP1]_L1.59
DIVMTQSPDSLAVSLGERATINCKSSQSLLYRSNQKNYLAWYQQKPGQSPKLLIYWASLRESGVPDRFTGSGSGTDFTLTISSLQAEDVAVYYCQQYYNYPRTFGGGTKVEIK

SEQ ID NO: 1756 - protein, 113 aa, synthetic construct
  source 1..113: note = STEAP-A[STEAP1]_L1.60
DIVMTQSPDSLAVSLGERATINCKSSQSLLYRSNQKNYLAWYQQKPGQSPKLLIYWASQRESGVPDRFTGSGSGTDFTLTISSLQAEDVAVYYCQQYYNYPRTFGGGTKVEIK

SEQ ID NO: 1757 - protein, 113 aa, synthetic construct
  source 1..113: note = STEAP-A[STEAP1]_L1.61
DIVMTQSPDSLAVSLGERATINCKSSQSLLYRSNQKNYLAWYQQKPGQSPKLLIYWASYRESGVPDRFTGSGSGTDFTLTISSLQAEDVAVYYCQQYYNYPRTFGGGTKVEIK

SEQ ID NO: 1758 - protein, 113 aa, synthetic construct
  source 1..113: note = STEAP-A[STEAP1]_L1.62
DIVMTQSPDSLAVSLGERATINCKSSQSLLYRSNQKNYLAWYQQKPGQSPKLLIYWASTRESGVPDRFTGSGSGTDFTLTISSLQAEDVAVYYCQQYANYPRTFGGGTKVEIK

SEQ ID NO: 1759 - protein, 113 aa, synthetic construct
  source 1..113: note = STEAP-A[STEAP1]_L1.63
DIVMTQSPDSLAVSLGERATINCKSSQSLLYRSNQKNYLAWYQQKPGQSPKLLIYWASTRESGVPDRFTGSGSGTDFTLTISSLQAEDVAVYYCQQYDNYPRTFGGGTKVEIK

SEQ ID NO: 1760 - protein, 113 aa, synthetic construct
  source 1..113: note = STEAP-A[STEAP1]_L1.64
DIVMTQSPDSLAVSLGERATINCKSSQSLLYRSNQKNYLAWYQQKPGQSPKLLIYWASTRESGVPDRFTGSGSGTDFTLTISSLQAEDVAVYYCQQYHNYPRTFGGGTKVEIK

SEQ ID NO: 1761 - protein, 113 aa, synthetic construct
  source 1..113: note = STEAP-A[STEAP1]_L1.65
DIVMTQSPDSLAVSLGERATINCKSSQSLLYRSNQKNYLAWYQQKPGQSPKLLIYWASTRESGVPDRFTGSGSGTDFTLTISSLQAEDVAVYYCQQYKNYPRTFGGGTKVEIK

SEQ ID NO: 1762 - protein, 113 aa, synthetic construct
  source 1..113: note = STEAP-A[STEAP1]_L1.66
DIVMTQSPDSLAVSLGERATINCKSSQSLLYRSNQKNYLAWYQQKPGQSPKLLIYWASTRESGVPDRFTGSGSGTDFTLTISSLQAEDVAVYYCQQYLNYPRTFGGGTKVEIK

SEQ ID NO: 1763 - protein, 113 aa, synthetic construct
  source 1..113: note = STEAP-A[STEAP1]_L1.67
DIVMTQSPDSLAVSLGERATINCKSSQSLLYRSNQKNYLAWYQQKPGQSPKLLIYWASTRESGVPDRFTGSGSGTDFTLTISSLQAEDVAVYYCQQYQNYPRTFGGGTKVEIK

SEQ ID NO: 1764 - protein, 113 aa, synthetic construct
  source 1..113: note = STEAP-A[STEAP1]_L1.68
DIVMTQSPDSLAVSLGERATINCKSSQSLLYRSNQKNYLAWYQQKPGQSPKLLIYWASTRESGVPDRFTGSGSGTDFTLTISSLQAEDVAVYYCQQYRNYPRTFGGGTKVEIK

SEQ ID NO: 1765 - protein, 113 aa, synthetic construct
  source 1..113: note = STEAP-A[STEAP1]_L1.69
DIVMTQSPDSLAVSLGERATINCKSSQSLLYRSNQKNYLAWYQQKPGQSPKLLIYWASTRESGVPDRFTGSGSGTDFTLTISSLQAEDVAVYYCQQYVNYPRTFGGGTKVEIK

SEQ ID NO: 1766 - protein, 113 aa, synthetic construct
  source 1..113: note = STEAP-A[STEAP1]_L1.70
DIVMTQSPDSLAVSLGERATINCKSSQSLLYRSNQKNYLAWYQQKPGQSPKLLIYWASTRESGVPDRFTGSGSGTDFTLTISSLQAEDVAVYYCQQYYDYPRTFGGGTKVEIK

SEQ ID NO: 1767 - protein, 113 aa, synthetic construct
  source 1..113: note = STEAP-A[STEAP1]_L1.71
DIVMTQSPDSLAVSLGERATINCKSSQSLLYRSNQKNYLAWYQQKPGQSPKLLIYWASTRESGVPDRFTGSGSGTDFTLTISSLQAEDVAVYYCQQYYHYPRTFGGGTKVEIK

SEQ ID NO: 1768 - protein, 113 aa, synthetic construct
  source 1..113: note = STEAP-A[STEAP1]_L1.72
DIVMTQSPDSLAVSLGERATINCKSSQSLLYRSNQKNYLAWYQQKPGQSPKLLIYWASTRESGVPDRFTGSGSGTDFTLTISSLQAEDVAVYYCQQYYKYPRTFGGGTKVEIK

SEQ ID NO: 1769 - protein, 113 aa, synthetic construct
  source 1..113: note = STEAP-A[STEAP1]_L1.73
DIVMTQSPDSLAVSLGERATINCKSSQSLLYRSNQKNYLAWYQQKPGQSPKLLIYWASTRESGVPDRFTGSGSGTDFTLTISSLQAEDVAVYYCQQYYLYPRTFGGGTKVEIK

SEQ ID NO: 1770 - protein, 113 aa, synthetic construct
  source 1..113: note = STEAP-A[STEAP1]_L1.74
DIVMTQSPDSLAVSLGERATINCKSSQSLLYRSNQKNYLAWYQQKPGQSPKLLIYWASTRESGVPDRFTGSGSGTDFTLTISSLQAEDVAVYYCQQYYQYPRTFGGGTKVEIK

SEQ ID NO: 1771 - protein, 113 aa, synthetic construct
  source 1..113: note = STEAP-A[STEAP1]_L1.75
DIVMTQSPDSLAVSLGERATINCKSSQSLLYRSNQKNYLAWYQQKPGQSPKLLIYWASTRESGVPDRFTGSGSGTDFTLTISSLQAEDVAVYYCQQYYRYPRTFGGGTKVEIK

SEQ ID NO: 1772 - protein, 113 aa, synthetic construct
  source 1..113: note = STEAP-A[STEAP1]_L1.76
DIVMTQSPDSLAVSLGERATINCKSSQSLLYRSNQKNYLAWYQQKPGQSPKLLIYWASTRESGVPDRFTGSGSGTDFTLTISSLQAEDVAVYYCQQYYSYPRTFGGGTKVEIK

SEQ ID NO: 1773 - protein, 113 aa, synthetic construct
  source 1..113: note = STEAP-A[STEAP1]_L1.77
DIVMTQSPDSLAVSLGERATINCKSSQSLLYRSNQKNYLAWYQQKPGQSPKLLIYWASTRESGVPDRFTGSGSGTDFTLTISSLQAEDVAVYYCQQYYTYPRTFGGGTKVEIK

SEQ ID NO: 1774 - protein, 113 aa, synthetic construct
  source 1..113: note = STEAP-A[STEAP1]_L1.78
DIVMTQSPDSLAVSLGERATINCKSSQSLLYRSNQKNYLAWYQQKPGQSPKLLIYWASTRESGVPDRFTGSGSGTDFTLTISSLQAEDVAVYYCQQYYNAPRTFGGGTKVEIK

SEQ ID NO: 1775 - protein, 113 aa, synthetic construct
  source 1..113: note = STEAP-A[STEAP1]_L1.79
DIVMTQSPDSLAVSLGERATINCKSSQSLLYRSNQKNYLAWYQQKPGQSPKLLIYWASTRESGVPDRFTGSGSGTDFTLTISSLQAEDVAVYYCQQYYNDPRTFGGGTKVEIK

SEQ ID NO: 1776 - protein, 113 aa, synthetic construct
  source 1..113: note = STEAP-A[STEAP1]_L1.80
DIVMTQSPDSLAVSLGERATINCKSSQSLLYRSNQKNYLAWYQQKPGQSPKLLIYWASTRESGVPDRFTGSGSGTDFTLTISSLQAEDVAVYYCQQYYNHPRTFGGGTKVEIK

SEQ ID NO: 1777 - protein, 113 aa, synthetic construct
  source 1..113: note = STEAP-A[STEAP1]_L1.81
DIVMTQSPDSLAVSLGERATINCKSSQSLLYRSNQKNYLAWYQQKPGQSPKLLIYWASTRESGVPDRFTGSGSGTDFTLTISSLQAEDVAVYYCQQYYNKPRTFGGGTKVEIK

SEQ ID NO: 1778 - protein, 113 aa, synthetic construct
  source 1..113: note = STEAP-A[STEAP1]_L1.82
DIVMTQSPDSLAVSLGERATINCKSSQSLLYRSNQKNYLAWYQQKPGQSPKLLIYWASTRESGVPDRFTGSGSGTDFTLTISSLQAEDVAVYYCQQYYNLPRTFGGGTKVEIK

SEQ ID NO: 1779 - protein, 113 aa, synthetic construct
  source 1..113: note = STEAP-A[STEAP1]_L1.83
DIVMTQSPDSLAVSLGERATINCKSSQSLLYRSNQKNYLAWYQQKPGQSPKLLIYWASTRESGVPDRFTGSGSGTDFTLTISSLQAEDVAVYYCQQYYNQPRTFGGGTKVEIK

SEQ ID NO: 1780 - protein, 113 aa, synthetic construct
  source 1..113: note = STEAP-A[STEAP1]_L1.84
DIVMTQSPDSLAVSLGERATINCKSSQSLLYRSNQKNYLAWYQQKPGQSPKLLIYWASTRESGVPDRFTGSGSGTDFTLTISSLQAEDVAVYYCQQYYNRPRTFGGGTKVEIK

SEQ ID NO: 1781 - protein, 113 aa, synthetic construct
  source 1..113: note = STEAP-A[STEAP1]_L1.85
DIVMTQSPDSLAVSLGERATINCKSSQSLLYRSNQKNYLAWYQQKPGQSPKLLIYWASTRESGVPDRFTGSGSGTDFTLTISSLQAEDVAVYYCQQYYNVPRTFGGGTKVEIK

SEQ ID NO: 1782 - protein, 113 aa, synthetic construct
  source 1..113: note = STEAP-A[STEAP1]_L1.86
DIDMTQSPDSLAVSLGERATINCKSSQSLLYRSNQKNYLAWYQQKPGQPPKLLIYWASTRESGVPDRFSGSGSGTDFTLTISSLQAEDVAVYYCQQYYNYPRTFGGGTKVEIK

SEQ ID NO: 1783 - protein, 113 aa, synthetic construct
  source 1..113: note = STEAP-A[STEAP1]_L1.87
DIVMTQSPDSLAVSLGERATINCKSDQSLLYRSNQKNYLAWYQQKPGQPPKLLIYWASTRESGVPDRFSGSGSGTDFTLTISSLQAEDVAVYYCQQYYNYPRTFGGGTKVEIK

SEQ ID NO: 1784 - protein, 113 aa, synthetic construct
  source 1..113: note = STEAP-A[STEAP1]_L1.88
DIVMTQSPDSLAVSLGERATINCKSEQSLLYRSNQKNYLAWYQQKPGQPPKLLIYWASTRESGVPDRFSGSGSGTDFTLTISSLQAEDVAVYYCQQYYNYPRTFGGGTKVEIK

SEQ ID NO: 1785 - protein, 113 aa, synthetic construct
  source 1..113: note = STEAP-A[STEAP1]_L1.89
DIVMTQSPDSLAVSLGERATINCKSSDSLLYRSNQKNYLAWYQQKPGQPPKLLIYWASTRESGVPDRFSGSGSGTDFTLTISSLQAEDVAVYYCQQYYNYPRTFGGGTKVEIK

SEQ ID NO: 1786 - protein, 113 aa, synthetic construct
  source 1..113: note = STEAP-A[STEAP1]_L1.90
DIVMTQSPDSLAVSLGERATINCKSSESLLYRSNQKNYLAWYQQKPGQPPKLLIYWASTRESGVPDRFSGSGSGTDFTLTISSLQAEDVAVYYCQQYYNYPRTFGGGTKVEIK

SEQ ID NO: 1787 - protein, 113 aa, synthetic construct
  source 1..113: note = STEAP-A[STEAP1]_L1.91
DIVMTQSPDSLAVSLGERATINCKSSKSLLYRSNQKNYLAWYQQKPGQPPKLLIYWASTRESGVPDRFSGSGSGTDFTLTISSLQAEDVAVYYCQQYYNYPRTFGGGTKVEIK

SEQ ID NO: 1788 - protein, 113 aa, synthetic construct
  source 1..113: note = STEAP-A[STEAP1]_L1.92
DIVMTQSPDSLAVSLGERATINCKSSQSLLYRSNQRNYLAWYQQKPGQPPKLLIYWASTRESGVPDRFSGSGSGTDFTLTISSLQAEDVAVYYCQQYYNYPRTFGGGTKVEIK

SEQ ID NO: 1789 - protein, 113 aa, synthetic construct
  source 1..113: note = STEAP-A[STEAP1]_L1.93
DIVMTQSPDSLAVSLGERATINCKSSQSLLYRSNQKNYLAWYQQKPGQPPKLLIYWALTRESGVPDRFSGSGSGTDFTLTISSLQAEDVAVYYCQQYYNYPRTFGGGTKVEIK

SEQ ID NO: 1790 - protein, 113 aa, synthetic construct
  source 1..113: note = STEAP-A[STEAP1]_L1.94
DIVMTQSPDSLAVSLGERATINCKSSQSLLYRSNQKNYLAWYQQKPGQPPKLLIYWAYTRESGVPDRFSGSGSGTDFTLTISSLQAEDVAVYYCQQYYNYPRTFGGGTKVEIK

SEQ ID NO: 1791 - protein, 113 aa, synthetic construct
  source 1..113: note = STEAP-A[STEAP1]_L1.95
DIVMTQSPDSLAVSLGERATINCKSSQSLLYRSNQKNYLAWYQQKPGQPPKLLIYWASKRESGVPDRFSGSGSGTDFTLTISSLQAEDVAVYYCQQYYNYPRTFGGGTKVEIK

SEQ ID NO: 1792 - protein, 113 aa, synthetic construct
  source 1..113: note = STEAP-A[STEAP1]_L1.96
DIVMTQSPDSLAVSLGERATINCKSSQTLLYRSNQKNYLAWYQQKPGQPPKLLIYWASTRESGVPDRFSGSGSGTDFTLTISSLQAEDVAVYYCQQYYNYPRTFGGGTKVEIK

SEQ ID NO: 1793 - protein, 113 aa, synthetic construct
  source 1..113: note = STEAP-A[STEAP1]_L1.97
DIVMTQSPDSLAVSLGERATINCKSSQSLLYRSNQKNYLAWYQQKPGQPPKLLIYWASTRESGVPDRFSGSGSGTDFTLTISSLQAEDVAVYYCQQYYKYPRTFGGGTKVEIK

SEQ ID NO: 1794 - protein, 113 aa, synthetic construct
  source 1..113: note = STEAP-A[STEAP1]_L1.98
DIVMTQSPDSLAVSLGERATINCKSSQTLLYRSNQRNYLAWYQQKPGQPPKLLIYWASTRESGVPDRFSGSGSGTDFTLTISSLQAEDVAVYYCQQYYNYPRTFGGGTKVEIK

SEQ ID NO: 1795 - protein, 113 aa, synthetic construct
  source 1..113: note = STEAP-A[STEAP1]_L1.99
DIVMTQSPDSLAVSLGERATINCKSSQTLLYRSNQKNYLAWYQQKPGQPPKLLIYWALTRESGVPDRFSGSGSGTDFTLTISSLQAEDVAVYYCQQYYNYPRTFGGGTKVEIK

SEQ ID NO: 1796 - protein, 113 aa, synthetic construct
  source 1..113: note = STEAP-A[STEAP1]_L1.100
DIVMTQSPDSLAVSLGERATINCKSSQTLLYRSNQKNYLAWYQQKPGQPPKLLIYWAYTRESGVPDRFSGSGSGTDFTLTISSLQAEDVAVYYCQQYYNYPRTFGGGTKVEIK

SEQ ID NO: 1797 - protein, 113 aa, synthetic construct
  source 1..113: note = STEAP-A[STEAP1]_L1.101
DIVMTQSPDSLAVSLGERATINCKSSQTLLYRSNQKNYLAWYQQKPGQPPKLLIYWASKRESGVPDRFSGSGSGTDFTLTISSLQAEDVAVYYCQQYYNYPRTFGGGTKVEIK

SEQ ID NO: 1798 - protein, 113 aa, synthetic construct
  source 1..113: note = STEAP-A[STEAP1]_L1.102
DIVMTQSPDSLAVSLGERATINCKSSQTLLYRSNQKNYLAWYQQKPGQPPKLLIYWASTRESGVPDRFSGSGSGTDFTLTISSLQAEDVAVYYCQQYYKYPRTFGGGTKVEIK

SEQ ID NO: 1799 - protein, 113 aa, synthetic construct
  source 1..113: note = STEAP-A[STEAP1]_L1.103
DIVMTQSPDSLAVSLGERATINCKSSQSLLYRSNQRNYLAWYQQKPGQPPKLLIYWALTRESGVPDRFSGSGSGTDFTLTISSLQAEDVAVYYCQQYYNYPRTFGGGTKVEIK

SEQ ID NO: 1800 - protein, 113 aa, synthetic construct
  source 1..113: note = STEAP-A[STEAP1]_L1.104
DIVMTQSPDSLAVSLGERATINCKSSQSLLYRSNQRNYLAWYQQKPGQPPKLLIYWAYTRESGVPDRFSGSGSGTDFTLTISSLQAEDVAVYYCQQYYNYPRTFGGGTKVEIK

SEQ ID NO: 1801 - protein, 113 aa, synthetic construct
  source 1..113: note = STEAP-A[STEAP1]_L1.105
DIVMTQSPDSLAVSLGERATINCKSSQSLLYRSNQRNYLAWYQQKPGQPPKLLIYWASKRESGVPDRFSGSGSGTDFTLTISSLQAEDVAVYYCQQYYNYPRTFGGGTKVEIK

SEQ ID NO: 1802 - protein, 113 aa, synthetic construct
  source 1..113: note = STEAP-A[STEAP1]_L1.106
DIVMTQSPDSLAVSLGERATINCKSSQSLLYRSNQRNYLAWYQQKPGQPPKLLIYWASTRESGVPDRFSGSGSGTDFTLTISSLQAEDVAVYYCQQYYKYPRTFGGGTKVEIK

SEQ ID NO: 1803 - protein, 113 aa, synthetic construct
  source 1..113: note = STEAP-A[STEAP1]_L1.107
DIVMTQSPDSLAVSLGERATINCKSSQSLLYRSNQKNYLAWYQQKPGQPPKLLIYWALKRESGVPDRFSGSGSGTDFTLTISSLQAEDVAVYYCQQYYNYPRTFGGGTKVEIK

SEQ ID NO: 1804 - protein, 113 aa, synthetic construct
  source 1..113: note = STEAP-A[STEAP1]_L1.108
DIVMTQSPDSLAVSLGERATINCKSSQSLLYRSNQKNYLAWYQQKPGQPPKLLIYWALTRESGVPDRFSGSGSGTDFTLTISSLQAEDVAVYYCQQYYKYPRTFGGGTKVEIK

SEQ ID NO: 1805 - protein, 113 aa, synthetic construct
  source 1..113: note = STEAP-A[STEAP1]_L1.109
DIVMTQSPDSLAVSLGERATINCKSSQSLLYRSNQKNYLAWYQQKPGQPPKLLIYWAYKRESGVPDRFSGSGSGTDFTLTISSLQAEDVAVYYCQQYYNYPRTFGGGTKVEIK

SEQ ID NO: 1806 - protein, 113 aa, synthetic construct
  source 1..113: note = STEAP-A[STEAP1]_L1.110
DIVMTQSPDSLAVSLGERATINCKSSQSLLYRSNQKNYLAWYQQKPGQPPKLLIYWAYTRESGVPDRFSGSGSGTDFTLTISSLQAEDVAVYYCQQYYKYPRTFGGGTKVEIK

SEQ ID NO: 1807 - protein, 113 aa, synthetic construct
  source 1..113: note = STEAP-A[STEAP1]_L1.111
DIVMTQSPDSLAVSLGERATINCKSSQSLLYRSNQKNYLAWYQQKPGQPPKLLIYWASKRESGVPDRFSGSGSGTDFTLTISSLQAEDVAVYYCQQYYKYPRTFGGGTKVEIK

SEQ ID NO: 1808 - protein, 113 aa, synthetic construct
  source 1..113: note = STEAP-A[STEAP1]_L1.112
DIVMTQSPDSLAVSLGERATINCKSSQSLLYRSNQRNYLAWYQQKPGQPPKLLIYWALKRESGVPDRFSGSGSGTDFTLTISSLQAEDVAVYYCQQYYNYPRTFGGGTKVEIK

SEQ ID NO: 1809 - protein, 113 aa, synthetic construct
  source 1..113: note = STEAP-A[STEAP1]_L1.113
DIVMTQSPDSLAVSLGERATINCKSSQSLLYRSNQRNYLAWYQQKPGQPPKLLIYWAYKRESGVPDRFSGSGSGTDFTLTISSLQAEDVAVYYCQQYYNYPRTFGGGTKVEIK

SEQ ID NO: 1810 - protein, 113 aa, synthetic construct
  source 1..113: note = STEAP-A[STEAP1]_L1.114
DIVMTQSPDSLAVSLGERATINCKSSQTLLYRSNQKNYLAWYQQKPGQPPKLLIYWALTRESGVPDRFSGSGSGTDFTLTISSLQAEDVAVYYCQQYYKYPRTFGGGTKVEIK

SEQ ID NO: 1811 - protein, 113 aa, synthetic construct
  source 1..113: note = STEAP-A[STEAP1]_L1.115
DIVMTQSPDSLAVSLGERATINCKSSQTLLYRSNQKNYLAWYQQKPGQPPKLLIYWAYTRESGVPDRFSGSGSGTDFTLTISSLQAEDVAVYYCQQYYKYPRTFGGGTKVEIK

SEQ ID NO: 1812 - protein, 113 aa, synthetic construct
  source 1..113: note = STEAP-A[STEAP1]_L1.116
DIVMTQSPDSLAVSLGERATINCKSSQTLLYRSNQKNYLAWYQQKPGQPPKLLIYWASKRESGVPDRFSGSGSGTDFTLTISSLQAEDVAVYYCQQYYKYPRTFGGGTKVEIK

SEQ ID NO: 1813 - protein, 113 aa, synthetic construct
  source 1..113: note = STEAP-A[STEAP1]_L1.117
DIVMTQSPDSLAVSLGERATINCKSSQSLLYRSNQRNYLAWYQQKPGQPPKLLIYWALTRESGVPDRFSGSGSGTDFTLTISSLQAEDVAVYYCQQYYKYPRTFGGGTKVEIK

SEQ ID NO: 1814 - protein, 113 aa, synthetic construct
  source 1..113: note = STEAP-A[STEAP1]_L1.118
DIVMTQSPDSLAVSLGERATINCKSSQSLLYRSNQRNYLAWYQQKPGQPPKLLIYWAYTRESGVPDRFSGSGSGTDFTLTISSLQAEDVAVYYCQQYYKYPRTFGGGTKVEIK

SEQ ID NO: 1815 - protein, 113 aa, synthetic construct
  source 1..113: note = STEAP-A[STEAP1]_L1.119
DIVMTQSPDSLAVSLGERATINCKSSQSLLYRSNQRNYLAWYQQKPGQPPKLLIYWASKRESGVPDRFSGSGSGTDFTLTISSLQAEDVAVYYCQQYYKYPRTFGGGTKVEIK

SEQ ID NO: 1816 - protein, 124 aa, synthetic construct; identical to SEQ ID NO: 1694
  source 1..124: note = [STEAP-A]_H1.230_L1.100 Variable heavy (vh) domain

SEQ ID NO: 1817 - protein, 6 aa, synthetic construct
  source 1..6: note = [STEAP-A]_H1.230_L1.100 vhCDR1
SDYSWN

SEQ ID NO: 1818 - protein, 16 aa, synthetic construct
  source 1..16: note = [STEAP-A]_H1.230_L1.100 vhCDR2
YIGTSGSTVYNPSLKS

SEQ ID NO: 1819 - protein, 15 aa, synthetic construct
  source 1..15: note = [STEAP-A]_H1.230_L1.100 vhCDR3
ERNYDYELYYYAMDY

SEQ ID NO: 1820 - protein, 113 aa, synthetic construct; identical to SEQ ID NO: 1796
  source 1..113: note = [STEAP-A]_H1.230_L1.100 Variable light (vl) domain

SEQ ID NO: 1821 - protein, 17 aa, synthetic construct
  source 1..17: note = [STEAP-A]_H1.230_L1.100 vlCDR1
KSSQTLLYRSNQKNYLA

SEQ ID NO: 1822 - protein, 7 aa, synthetic construct
  source 1..7: note = [STEAP-A]_H1.230_L1.100 vlCDR2
WAYTRES

SEQ ID NO: 1823 - protein, 9 aa, synthetic construct
  source 1..9: note = [STEAP-A]_H1.230_L1.100 vlCDR3
QQYYNYPRT

SEQ ID NO: 1824 - protein, 124 aa, synthetic construct; identical to SEQ ID NO: 1694
  source 1..124: note = [STEAP-A]_H1.230_L1.115 Variable heavy (vh) domain

SEQ ID NO: 1825 - protein, 6 aa, synthetic construct
  source 1..6: note = [STEAP-A]_H1.230_L1.115 vhCDR1
SDYSWN

SEQ ID NO: 1826 - protein, 16 aa, synthetic construct
  source 1..16: note = [STEAP-A]_H1.230_L1.115 vhCDR2
YIGTSGSTVYNPSLKS

SEQ ID NO: 1827 - protein, 15 aa, synthetic construct
  source 1..15: note = [STEAP-A]_H1.230_L1.115 vhCDR3
ERNYDYELYYYAMDY

SEQ ID NO: 1828 - protein, 113 aa, synthetic construct; identical to SEQ ID NO: 1811
  source 1..113: note = [STEAP-A]_H1.230_L1.115 Variable light (vl) domain

SEQ ID NO: 1829 - protein, 17 aa, synthetic construct
  source 1..17: note = [STEAP-A]_H1.230_L1.115 vlCDR1
KSSQTLLYRSNQKNYLA

SEQ ID NO: 1830 - protein, 7 aa, synthetic construct
  source 1..7: note = [STEAP-A]_H1.230_L1.115 vlCDR2
WAYTRES

SEQ ID NO: 1831 - protein, 9 aa, synthetic construct
  source 1..9: note = [STEAP-A]_H1.230_L1.115 vlCDR3
QQYYKYPRT

SEQ ID NO: 1832 - protein, 453 aa, synthetic construct; identical to SEQ ID NO: 500
  source 1..453: note = XENP46851 Chain 1-  STEAP-A[STEAP1]_H1.228_IgG1_pI(-) _Isosteric_A_PVA_/S267K/L368D/K370S/M428L/N434S

SEQ ID NO: 1833 - protein, 720 aa, synthetic construct
  source 1..720: note = XENP46851 Chain 2-  STEAP-A[STEAP1]_H1.228_Fab_(G4S)2 _1A7[CD28]_H1.129_L1_VH_G46C_VL_Q108C_scFv(GKPGS)4_(G4S)2-F c(222)_IgG1_PVA_/S267K/S364K/E357Q/M428L/N434S
QVQVQESGPGLVKPSQTLSLTCTVSGYSITSDYSWNWIRQPPGKKLEWIGYIGNSGSTVYNPSLKSRVTISRDTSKNQFSLKLSSVTAADTAVYYCARERNYDYELYYYAMDYWGQGTLVTVSSASTKGPSVFPLAPSSKSTSGGTAALGCLVKDYFPEPVTVSWNSGALTSGVHTFPAVLQSSGLYSLSSVVTVPSSSLGTQTYICNVNHKPSNTKVDKKVEPKSCGGGGSGGGGSEVQLLESGGGLVQPGGSLRLSCAASGFTFSSYYMSWVRQAPGKCLEWVSTISERADSTYYADSVKGRFTISRDNSKNTLYLQMNSLRAEDTAVYYCAKSGPGLRQVGFDYWGQGTLVTVSSGKPGSGKPGSGKPGSGKPGSDIQMTQSPSSLSASVGDRVTITCRASQSISSYLNWYQQKPGKAPKLLIYAASSLQSGVPSRFSGSGSGTDFTLTISSLQPEDFATYYCQQSYSTPFTFGCGTKLEIKGGGGSGGGGSKTHTCPPCPAPPVAGPSVFLFPPKPKDTLMISRTPEVTCVVVDVKHEDPEVKFNWYVDGVEVHNAKTKPREEQYNSTYRVVSVLTVLHQDWLNGKEYKCKVSNKALPAPIEKTISKAKGQPREPQVYTLPPSREQMTKNQVKLTCLVKGFYPSDIAVEWESNGQPENNYKTTPPVLDSDGSFFLYSKLTVDKSRWQQGNVFSCSVLHEALHSHYTQKSLSLSPGK

SEQ ID NO: 1834 - protein, 220 aa, synthetic construct; identical to SEQ ID NO: 493
  source 1..220: note = XENP46851 Chain 3-  STEAP-A[STEAP1]_L1.115_Light Chain

SEQ ID NO: 1835 - protein, 121 aa, synthetic construct
  source 1..121: note = CEA-A Variable Heavy (vh) Domain
EVKLVESGGGLVQPGGSLRLSCATSGFTFTDYYMNWVRQPPGKALEWLGFIGNKANGYTTEYSASVKGRFTISRDKSQSILYLQMNTLRAEDSATYYCTRDRGLRFYFDYWGQGTTLTVSS

SEQ ID NO: 1836 - protein, 10 aa, synthetic construct
  source 1..10: note = CEA-A vhCDR1
GFTFTDYYMN

SEQ ID NO: 1837 - protein, 19 aa, synthetic construct
  source 1..19: note = CEA-A vhCDR2
FIGNKANGYTTEYSASVKG

SEQ ID NO: 1838 - protein, 10 aa, synthetic construct
  source 1..10: note = CEA-A vhCDR3
DRGLRFYFDY

SEQ ID NO: 1839 - protein, 106 aa, synthetic construct
  source 1..106: note = CEA-A Variable Light (vl) Domain
QTVLSQSPAILSASPGEKVTMTCRASSSVTYIHWYQQKPGSSPKSWIYATSNLASGVPARFSGSGSGTSYSLTISRVEAEDAATYYCQHWSSKPPTFGGGTKLEIK

SEQ ID NO: 1840 - protein, 10 aa, synthetic construct
  source 1..10: note = CEA-A vlCDR1
RASSSVTYIH

SEQ ID NO: 1841 - protein, 7 aa, synthetic construct
  source 1..7: note = CEA-A vlCDR2
ATSNLAS

SEQ ID NO: 1842 - protein, 9 aa, synthetic construct
  source 1..9: note = CEA-A vlCDR3
QHWSSKPPT

SEQ ID NO: 1843 - protein, 121 aa, synthetic construct
  source 1..121: note = CEA-B Variable Heavy (vh) Domain
EVQLVESGGGLVQPGGSLRLSCAASGFNIKDTYMHWVRQAPGKGLEWVARIDPANGNSKYADSVKGRFTISADTSKNTAYLQMNSLRAEDTAVYYCAPFGYYVSDYAMAYWGQGTLVTVSS

SEQ ID NO: 1844 - protein, 10 aa, synthetic construct
  source 1..10: note = CEA-B vhCDR1
GFNIKDTYMH

SEQ ID NO: 1845 - protein, 17 aa, synthetic construct
  source 1..17: note = CEA-B vhCDR2
RIDPANGNSKYADSVKG

SEQ ID NO: 1846 - protein, 12 aa, synthetic construct
  source 1..12: note = CEA-B vhCDR3
FGYYVSDYAMAY

SEQ ID NO: 1847 - protein, 111 aa, synthetic construct
  source 1..111: note = CEA-B Variable Light (vl) Domain
DIQLTQSPSSLSASVGDRVTITCRAGESVDIFGVGFLHWYQQKPGKAPKLLIYRASNLESGVPSRFSGSGSRTDFTLTISSLQPEDFATYYCQQTNEDPYTFGQGTKVEIK

SEQ ID NO: 1848 - protein, 15 aa, synthetic construct
  source 1..15: note = CEA-B vlCDR1
RAGESVDIFGVGFLH

SEQ ID NO: 1849 - protein, 7 aa, synthetic construct
  source 1..7: note = CEA-B vlCDR2
RASNLES

SEQ ID NO: 1850 - protein, 9 aa, synthetic construct
  source 1..9: note = CEA-B vlCDR3
QQTNEDPYT

SEQ ID NO: 1851 - protein, 120 aa, synthetic construct
  source 1..120: note = CEA-C Variable Heavy (vh) Domain
QVKLQQSGAELVRSGTSVKLSCTASGFNIKDSYMHWLRQGPEQGLEWIGWIDPENGDTEYAPKFQGKATFTTDTSSNTAYLQLSSLTSEDTAVYYCNEGTPTGPYYFDYWGQGTTVTVSS

SEQ ID NO: 1852 - protein, 10 aa, synthetic construct
  source 1..10: note = CEA-C vhCDR1
GFNIKDSYMH

SEQ ID NO: 1853 - protein, 17 aa, synthetic construct
  source 1..17: note = CEA-C vhCDR2
WIDPENGDTEYAPKFQG

SEQ ID NO: 1854 - protein, 11 aa, synthetic construct
  source 1..11: note = CEA-C vhCDR3
GTPTGPYYFDY

SEQ ID NO: 1855 - protein, 106 aa, synthetic construct
  source 1..106: note = CEA-C Variable Light (vl) Domain
ENVLTQSPAIMSASPGEKVTITCSASSSVSYMHWFQQKPGTSPKLWIYSTSNLASGVPARFSGSGSGTSYSLTISRMEAEDAATYYCQQRSSYPLTFGAGTKLELK

SEQ ID NO: 1856 - protein, 10 aa, synthetic construct
  source 1..10: note = CEA-C vlCDR1
SASSSVSYMH

SEQ ID NO: 1857 - protein, 7 aa, synthetic construct
  source 1..7: note = CEA-C vlCDR2
STSNLAS

SEQ ID NO: 1858 - protein, 9 aa, synthetic construct
  source 1..9: note = CEA-C vlCDR3
QQRSSYPLT

SEQ ID NO: 1859 - protein, 119 aa, synthetic construct
  source 1..119: note = CEA-D Variable Heavy (vh) Domain
EVQLVESGGGVVQPGRSLRLSCSASGFDFTTYWMSWVRQAPGKGLEWIGEIHPDSSTINYAPSLKDRFTISRDNAKNTLFLQMDSLRPEDTGVYFCASLYFGFPWFAYWGQGTPVTVSS

SEQ ID NO: 1860 - protein, 10 aa, synthetic construct
  source 1..10: note = CEA-D vhCDR1
GFDFTTYWMS

SEQ ID NO: 1861 - protein, 17 aa, synthetic construct
  source 1..17: note = CEA-D vhCDR2
EIHPDSSTINYAPSLKD

SEQ ID NO: 1862 - protein, 10 aa, synthetic construct
  source 1..10: note = CEA-D vhCDR3
LYFGFPWFAY

SEQ ID NO: 1863 - protein, 106 aa, synthetic construct
  source 1..106: note = CEA-D Variable Light (vl) Domain
DIQLTQSPSSLSASVGDRVTITCKASQDVGTSVAWYQQKPGKAPKLLIYWTSTRHTGVPSRFSGSGSGTDFTFTISSLQPEDIATYYCQQYSLYRSFGQGTKVEIK

SEQ ID NO: 1864 - protein, 11 aa, synthetic construct
  source 1..11: note = CEA-D vlCDR1
KASQDVGTSVA

SEQ ID NO: 1865 - protein, 7 aa, synthetic construct
  source 1..7: note = CEA-D vlCDR2
WTSTRHT

SEQ ID NO: 1866 - protein, 8 aa, synthetic construct
  source 1..8: note = CEA-D vlCDR3
QQYSLYRS

SEQ ID NO: 1867 - protein, 120 aa, synthetic construct [sequence omitted]

SEQ ID NO: 1868 - protein, 10 aa, synthetic construct
  source 1..10: note = CEA-E vhCDR1
GFVFSSYDMS

SEQ ID NO: 1869 - protein, 17 aa, synthetic construct
  source 1..17: note = CEA-E vhCDR2
YISSGGGITYAPSTVKG

SEQ ID NO: 1870 - protein, 11 aa, synthetic construct
  source 1..11: note = CEA-E vhCDR3
HYFGSSGPFAY

SEQ ID NO: 1871 - protein, 107 aa, synthetic construct [sequence omitted]

SEQ ID NO: 1872 - protein, 11 aa, synthetic construct
  source 1..11: note = CEA-E vlCDR1
RASENIFSYLA

SEQ ID NO: 1873 - protein, 7 aa, synthetic construct
  source 1..7: note = CEA-E vlCDR2
NTRTLAE

SEQ ID NO: 1874 - protein, 9 aa, synthetic construct
  source 1..9: note = CEA-E vlCDR3
QHHYGTPFT

SEQ ID NO: 1875 - protein, 121 aa, synthetic construct
  source 1..121: note = CEA-F Variable Heavy (vh) Domain
QVQLVQSGAEVKKPGASVKVSCKASGYTFTEFGMNWVRQAPGQGLEWMGWINTKTGEATYVEEFKGRVTFTTDTSTSTAYMELRSLRSDDTAVYYCARWDFAYYVEAMDYWGQGTTVTVSS

SEQ ID NO: 1876 - protein, 10 aa, synthetic construct
  source 1..10: note = CEA-F vhCDR1
GYTFTEFGMN

SEQ ID NO: 1877 - protein, 17 aa, synthetic construct
  source 1..17: note = CEA-F vhCDR2
WINTKTGEATYVEEFKG

SEQ ID NO: 1878 - protein, 12 aa, synthetic construct
  source 1..12: note = CEA-F vhCDR3
WDFAYYVEAMDY

SEQ ID NO: 1879 - protein, 108 aa, synthetic construct
  source 1..108: note = CEA-F Variable Light (vl) Domain
DIQMTQSPSSLSASVGDRVTITCKASAAVGTYVAWYQQKPGKAPKLLIYSASYRKRGVPSRFSGSGSGTDFTLTISSLQPEDFATYYCHQYYTYPLFTFGQGTKLEIK

SEQ ID NO: 1880 - protein, 11 aa, synthetic construct
  source 1..11: note = CEA-F vlCDR1
KASAAVGTYVA

SEQ ID NO: 1881 - protein, 7 aa, synthetic construct
  source 1..7: note = CEA-F vlCDR2
SASYRKR

SEQ ID NO: 1882 - protein, 10 aa, synthetic construct
  source 1..10: note = CEA-F vlCDR3
HQYYTYPLFT

SEQ ID NO: 1883 - protein, 121 aa, synthetic construct
  source 1..121: note = B9 Variable Heavy (vh) Domain
EVQLVESGGGLVQPGRSLRLSCAASGFTVSSYWMHWVRQAPGKGLEWVGFIRNKANGGTTEYAASVKGRFTISRDDSKNTLYLQMNSLRAEDTAVYYCARDRGLRFYFDYWGQGTTVTVSS

SEQ ID NO: 1884 - protein, 10 aa, synthetic construct
  source 1..10: note = B9 vhCDR1
GFTVSSYWMH

SEQ ID NO: 1885 - protein, 19 aa, synthetic construct
  source 1..19: note = B9 vhCDR2
FIRNKANGGTTEYAASVKG

SEQ ID NO: 1886 - protein, 10 aa, synthetic construct
  source 1..10: note = B9 vhCDR3
DRGLRFYFDY

SEQ ID NO: 1887 - protein, 116 aa, synthetic construct
  source 1..116: note = B9 Variable Light (vl) Domain
QAVLTQPASLSASPGASASLTCTLRRGINVGAYSIYWYQQKPGSPPQYLLRYKSDSDKQQGSGVSSRFSASKDASANAGILLISGLQSEDEADYYCMIWHSGASAVFGGGTKLTVL

SEQ ID NO: 1888 - protein, 14 aa, synthetic construct
  source 1..14: note = B9 vlCDR1
TLRRGINVGAYSIY

SEQ ID NO: 1889 - protein, 7 aa, synthetic construct
  source 1..7: note = B9 vlCDR2
SDKQQGS

SEQ ID NO: 1890 - protein, 10 aa, synthetic construct
  source 1..10: note = B9 vlCDR3
MIWHSGASAV

SEQ ID NO: 1891 - protein, 121 aa, synthetic construct
  source 1..121: note = E12 Variable Heavy (vh) Domain
EVQLVESGGGLVQPGRSLRLSCAASGFTVSSYWMHWVRQAPGKGLEWVGFILNKANGGTTEYAASVKGRFTISRDDSKNTLYLQMNSLRAEDTAVYYCARDRGLRFYFDYWGQGTTVTVSS

SEQ ID NO: 1892 - protein, 10 aa, synthetic construct
  source 1..10: note = E12 vhCDR1
GFTVSSYWMH

SEQ ID NO: 1893 - protein, 19 aa, synthetic construct
  source 1..19: note = E12 vhCDR2
FILNKANGGTTEYAASVKG

SEQ ID NO: 1894 - protein, 10 aa, synthetic construct
  source 1..10: note = E12 vhCDR3
DRGLRFYFDY

SEQ ID NO: 1895 - protein, 116 aa, synthetic construct; identical to SEQ ID NO: 1887
  source 1..116: note = E12 Variable Light (vl) Domain

SEQ ID NO: 1896 - protein, 14 aa, synthetic construct
  source 1..14: note = E12 vlCDR1
TLRRGINVGAYSIY

SEQ ID NO: 1897 - protein, 7 aa, synthetic construct
  source 1..7: note = E12 vlCDR2
SDKQQGS

SEQ ID NO: 1898 - protein, 10 aa, synthetic construct
  source 1..10: note = E12 vlCDR3
MIWHSGASAV

SEQ ID NO: 1899 - protein, 119 aa, synthetic construct
  source 1..119: note = A5 Variable Heavy (vh) Domain
EVQLVESGGGVVQPGRSLRLSCAASGFTLSTYAMHWVRQAPGKGLEWVALISNDGSNKYYADSVKGRFTISRDNSKNTLYLQMNSLRAEDTAVYYCARDRGLRFYFDYWGQGTTVTVSS

SEQ ID NO: 1900 - protein, 10 aa, synthetic construct
  source 1..10: note = A5 vhCDR1
GFTLSTYAMH

SEQ ID NO: 1901 - protein, 17 aa, synthetic construct
  source 1..17: note = A5 vhCDR2
LISNDGSNKYYADSVKG

SEQ ID NO: 1902 - protein, 10 aa, synthetic construct
  source 1..10: note = A5 vhCDR3
DRGLRFYFDY

SEQ ID NO: 1903 - protein, 116 aa, synthetic construct; identical to SEQ ID NO: 1887
  source 1..116: note = A5 Variable Light (vl) Domain

SEQ ID NO: 1904 - protein, 14 aa, synthetic construct
  source 1..14: note = A5 vlCDR1
TLRRGINVGAYSIY

SEQ ID NO: 1905 - protein, 7 aa, synthetic construct
  source 1..7: note = A5 vlCDR2
SDKQQGS

SEQ ID NO: 1906 - protein, 10 aa, synthetic construct
  source 1..10: note = A5 vlCDR3
MIWHSGASAV

SEQ ID NO: 1907 - protein, 119 aa, synthetic construct
  source 1..119: note = D8 Variable Heavy (vh) Domain
EVQLVESGGGVVQPGRSLRLSCAASGFTLSTYAMHWVRQAPGKGLEWVALISNDGSNKYYADSVKGRFTISRDNSKNTLYLQMNSLRAEDTAVYYCTRDRGLRFYFDYWGQGTTVTVSS

SEQ ID NO: 1908 - protein, 10 aa, synthetic construct
  source 1..10: note = D8 vhCDR1
GFTLSTYAMH

SEQ ID NO: 1909 - protein, 17 aa, synthetic construct
  source 1..17: note = D8 vhCDR2
LISNDGSNKYYADSVKG

SEQ ID NO: 1910 - protein, 10 aa, synthetic construct
  source 1..10: note = D8 vhCDR3
DRGLRFYFDY

SEQ ID NO: 1911 - protein, 116 aa, synthetic construct; identical to SEQ ID NO: 1887
  source 1..116: note = D8 Variable Light (vl) Domain

SEQ ID NO: 1912 - protein, 14 aa, synthetic construct
  source 1..14: note = D8 vlCDR1
TLRRGINVGAYSIY

SEQ ID NO: 1913 - protein, 7 aa, synthetic construct
  source 1..7: note = D8 vlCDR2
SDKQQGS

SEQ ID NO: 1914 - protein, 10 aa, synthetic construct
  source 1..10: note = D8 vlCDR3
MIWHSGASAV

SEQ ID NO: 1915 - protein, 121 aa, synthetic construct
  source 1..121: note = T84.66 Variable Heavy (vh) Domain
EVQLQQSGAELVEPGASVKLSCTASGFNIKDTYMHWVKQRPEQGLEWIGRIDPANGNSKYVPKFQGKATITADTSSNTAYLQLTSLTSEDTAVYYCAPFGYYVSDYAMAYWGQGTSVTVSS

SEQ ID NO: 1916 - protein, 10 aa, synthetic construct
  source 1..10: note = T84.66 vhCDR1
GFNIKDTYMH

SEQ ID NO: 1917 - protein, 17 aa, synthetic construct
  source 1..17: note = T84.66 vhCDR2
RIDPANGNSKYVPKFQG

SEQ ID NO: 1918 - protein, 12 aa, synthetic construct
  source 1..12: note = T84.66 vhCDR3
FGYYVSDYAMAY

SEQ ID NO: 1919 - protein, 111 aa, synthetic construct
  source 1..111: note = T84.66 Variable Light (vl) Domain
DIVLTQSPASLAVSLGQRATMSCRAGESVDIFGVGFLHWYQQKPGQPPKLLIYRASNLESGIPVRFSGTGSRTDFTLIIDPVEADDVATYYCQQTNEDPYTFGGGTKLEIK

SEQ ID NO: 1920 - protein, 15 aa, synthetic construct
  source 1..15: note = T84.66 vlCDR1
RAGESVDIFGVGFLH

SEQ ID NO: 1921 - protein, 7 aa, synthetic construct
  source 1..7: note = T84.66 vlCDR2
RASNLES

SEQ ID NO: 1922 - protein, 9 aa, synthetic construct
  source 1..9: note = T84.66 vlCDR3
QQTNEDPYT

SEQ ID NO: 1923 - protein, 121 aa, synthetic construct
  source 1..121: note = M5B Variable Heavy (vh) Domain
EVQLVESGGGLVQPGGSLRLSCAASGFNIKDTYMHWVRQAPGKGLEWVARIDPANGNSKYVPKFQGRATISADTSKNTAYLQMNSLRAEDTAVYYCAPFGYYVSDYAMAYWGQGTLVTVSS

SEQ ID NO: 1924 - protein, 10 aa, synthetic construct
  source 1..10: note = M5B vhCDR1
GFNIKDTYMH

SEQ ID NO: 1925 - protein, 17 aa, synthetic construct
  source 1..17: note = M5B vhCDR2
RIDPANGNSKYVPKFQG

SEQ ID NO: 1926 - protein, 12 aa, synthetic construct
  source 1..12: note = M5B vhCDR3
FGYYVSDYAMAY

SEQ ID NO: 1927 - protein, 111 aa, synthetic construct; identical to SEQ ID NO: 1847
  source 1..111: note = M5B Variable Light (vl) Domain

SEQ ID NO: 1928 - protein, 15 aa, synthetic construct
  source 1..15: note = M5B vlCDR1
RAGESVDIFGVGFLH

SEQ ID NO: 1929 - protein, 7 aa, synthetic construct
  source 1..7: note = M5B vlCDR2
RASNLES

SEQ ID NO: 1930 - protein, 9 aa, synthetic construct
  source 1..9: note = M5B vlCDR3
QQTNEDPYT

SEQ ID NO: 1931 - protein, 120 aa, synthetic construct
  source 1..120: note = Shanghai Haikang Variable Heavy (vh) Domain
QVQLQQSGAELVRSGASIKLSCTASGFNIKHYYMHWVKQRPEQGLEWIGWINPENVDTEYAPKFQGKATMTADTSSNTAYLQLSSLTSEDTAVYYCNHYRYAGGGALDYWGQGTTVTVSS

SEQ ID NO: 1932 - protein, 10 aa, synthetic construct
  source 1..10: note = Shanghai Haikang vhCDR1
GFNIKHYYMH

SEQ ID NO: 1933 - protein, 17 aa, synthetic construct
  source 1..17: note = Shanghai Haikang vhCDR2
WINPENVDTEYAPKFQG

SEQ ID NO: 1934 - protein, 11 aa, synthetic construct
  source 1..11: note = Shanghai Haikang vhCDR3
YRYAGGGALDY

SEQ ID NO: 1935 - protein, 105 aa, synthetic construct
  source 1..105: note = Shanghai Haikang Variable Light (vl) Domain
DIQLTQSPAIMSASPGEKVTMTCSASSSVSYIHWYQQKSGTSPKRWVYDTSKLASGVPARFSGSGSGTSYSLTISTMEAEDAATYYCQQWNNNPYSFGGGTKVVI

SEQ ID NO: 1936 - protein, 10 aa, synthetic construct
  source 1..10: note = Shanghai Haikang vlCDR1
SASSSVSYIH

SEQ ID NO: 1937 - protein, 7 aa, synthetic construct
  source 1..7: note = Shanghai Haikang vlCDR2
DTSKLAS

SEQ ID NO: 1938 - protein, 9 aa, synthetic construct
  source 1..9: note = Shanghai Haikang vlCDR3
QQWNNNPYS

SEQ ID NO: 1939 - protein, 448 aa, synthetic construct
  source 1..448: note = XENP44329 Chain 1 - CEA-D[CEACAM5]_H1_IgG1_pI(-)_Isosteric_A_PVA_/S267K/L368D/K 370S
EVQLVESGGGVVQPGRSLRLSCSASGFDFTTYWMSWVRQAPGKGLEWIGEIHPDSSTINYAPSLKDRFTISRDNAKNTLFLQMDSLRPEDTGVYFCASLYFGFPWFAYWGQGTPVTVSSASTKGPSVFPLAPSSKSTSGGTAALGCLVKDYFPEPVTVSWNSGALTSGVHTFPAVLQSSGLYSLSSVVTVPSSSLGTQTYICNVNHKPSDTKVDKKVEPKSCDKTHTCPPCPAPPVAGPSVFLFPPKPKDTLMISRTPEVTCVVVDVKHEDPEVKFNWYVDGVEVHNAKTKPREEEYNSTYRVVSVLTVLHQDWLNGKEYKCKVSNKALPAPIEKTISKAKGQPREPQVYTLPPSREEMTKNQVSLTCDVSGFYPSDIAVEWESDGQPENNYKTTPPVLDSDGSFFLYSKLTVDKSRWEQGDVFSCSVMHEALHNHYTQKSLSLSPGK

SEQ ID NO: 1940 - protein, 479 aa, synthetic construct; identical to SEQ ID NO: 480
  source 1..479: note = XENP44329 Chain 2 - 1A7[CD28]_H1.14_L1.71_scFv(GKPGS)4_Fc(216)_IgG1_C220S/PVA_/ S267K/S364K/E357Q

SEQ ID NO: 1941 - protein, 213 aa, synthetic construct
  source 1..213: note = XENP44329 Chain 3 - CEA-D[CEACAM5]_L1
DIQLTQSPSSLSASVGDRVTITCKASQDVGTSVAWYQQKPGKAPKLLIYWTSTRHTGVPSRFSGSGSGTDFTFTISSLQPEDIATYYCQQYSLYRSFGQGTKVEIKRTVAAPSVFIFPPSDEQLKSGTASVVCLLNNFYPREAKVQWKVDNALQSGNSQESVTEQDSKDSTYSLSSTLTLSKADYEKHKVYACEVTHQGLSSPVTKSFNRGEC

SEQ ID NO: 1942 - protein, 449 aa, synthetic construct
  source 1..449: note = XENP44330 Chain 1 - CEA-E[CEACAM5]_H1_IgG1_pI(-)_Isosteric_A_PVA_/S267K/L368D/K 370S
EVQLQESGPGLVKPGGSLSLSCAASGFVFSSYDMSWVRQTPERGLEWVAYISSGGGITYAPSTVKGRFTVSRDNAKNTLYLQMNSLTSEDTAVYYCAAHYFGSSGPFAYWGQGTLVTVSSASTKGPSVFPLAPSSKSTSGGTAALGCLVKDYFPEPVTVSWNSGALTSGVHTFPAVLQSSGLYSLSSVVTVPSSSLGTQTYICNVNHKPSDTKVDKKVEPKSCDKTHTCPPCPAPPVAGPSVFLFPPKPKDTLMISRTPEVTCVVVDVKHEDPEVKFNWYVDGVEVHNAKTKPREEEYNSTYRVVSVLTVLHQDWLNGKEYKCKVSNKALPAPIEKTISKAKGQPREPQVYTLPPSREEMTKNQVSLTCDVSGFYPSDIAVEWESDGQPENNYKTTPPVLDSDGSFFLYSKLTVDKSRWEQGDVFSCSVMHEALHNHYTQKSLSLSPGK

SEQ ID NO: 1943 - protein, 479 aa, synthetic construct; identical to SEQ ID NO: 480
  source 1..479: note = XENP44330 Chain 2 - 1A7[CD28]_H1.14_L1.71_scFv(GKPGS)4_Fc(216)_IgG1_C220S/PVA_/ S267K/S364K/E357Q

SEQ ID NO: 1944 - protein, 214 aa, synthetic construct
  source 1..214: note = XENP44330 Chain 3 - CEA-E[CEACAM5]_L1
DIQMTQSPASLSASVGDRVTITCRASENIFSYLAWYQQKPGKSPKLLVYNTRTLAEGVPSRFSGSGSGTDFSLTISSLQPEDFATYYCQHHYGTPFTFGSGTKLEIKRTVAAPSVFIFPPSDEQLKSGTASVVCLLNNFYPREAKVQWKVDNALQSGNSQESVTEQDSKDSTYSLSSTLTLSKADYEKHKVYACEVTHQGLSSPVTKSFNRGEC

SEQ ID NO: 1945 - protein, 450 aa, synthetic construct
  source 1..450: note = XENP44331 Chain 1 - CEA-F[CEACAM5]_H1_IgG1_pI(-)_Isosteric_A_PVA_/S267K/L368D/K 370S
QVQLVQSGAEVKKPGASVKVSCKASGYTFTEFGMNWVRQAPGQGLEWMGWINTKTGEATYVEEFKGRVTFTTDTSTSTAYMELRSLRSDDTAVYYCARWDFAYYVEAMDYWGQGTTVTVSSASTKGPSVFPLAPSSKSTSGGTAALGCLVKDYFPEPVTVSWNSGALTSGVHTFPAVLQSSGLYSLSSVVTVPSSSLGTQTYICNVNHKPSDTKVDKKVEPKSCDKTHTCPPCPAPPVAGPSVFLFPPKPKDTLMISRTPEVTCVVVDVKHEDPEVKFNWYVDGVEVHNAKTKPREEEYNSTYRVVSVLTVLHQDWLNGKEYKCKVSNKALPAPIEKTISKAKGQPREPQVYTLPPSREEMTKNQVSLTCDVSGFYPSDIAVEWESDGQPENNYKTTPPVLDSDGSFFLYSKLTVDKSRWEQGDVFSCSVMHEALHNHYTQKSLSLSPGK

SEQ ID NO: 1946 - protein, 479 aa, synthetic construct; identical to SEQ ID NO: 480
  source 1..479: note = XENP44331 Chain 2 - 1A7[CD28]_H1.14_L1.71_scFv(GKPGS)4_Fc(216)_IgG1_C220S/PVA_/ S267K/S364K/E357Q

SEQ ID NO: 1947 - protein, 215 aa, synthetic construct
  source 1..215: note = XENP44331 Chain 3 - CEA-F[CEACAM5]_L1
DIQMTQSPSSLSASVGDRVTITCKASAAVGTYVAWYQQKPGKAPKLLIYSASYRKRGVPSRFSGSGSGTDFTLTISSLQPEDFATYYCHQYYTYPLFTFGQGTKLEIKRTVAAPSVFIFPPSDEQLKSGTASVVCLLNNFYPREAKVQWKVDNALQSGNSQESVTEQDSKDSTYSLSSTLTLSKADYEKHKVYACEVTHQGLSSPVTKSFNRGEC

SEQ ID NO: 1948 - protein, 450 aa, synthetic construct
  source 1..450: note = XENP44332 Chain 1 - CEA-A[CEACAM5]_H0_IgG1_pI(-)_Isosteric_A_PVA_/S267K/L368D/K 370S
EVKLVESGGGLVQPGGSLRLSCATSGFTFTDYYMNWVRQPPGKALEWLGFIGNKANGYTTEYSASVKGRFTISRDKSQSILYLQMNTLRAEDSATYYCTRDRGLRFYFDYWGQGTTLTVSSASTKGPSVFPLAPSSKSTSGGTAALGCLVKDYFPEPVTVSWNSGALTSGVHTFPAVLQSSGLYSLSSVVTVPSSSLGTQTYICNVNHKPSDTKVDKKVEPKSCDKTHTCPPCPAPPVAGPSVFLFPPKPKDTLMISRTPEVTCVVVDVKHEDPEVKFNWYVDGVEVHNAKTKPREEEYNSTYRVVSVLTVLHQDWLNGKEYKCKVSNKALPAPIEKTISKAKGQPREPQVYTLPPSREEMTKNQVSLTCDVSGFYPSDIAVEWESDGQPENNYKTTPPVLDSDGSFFLYSKLTVDKSRWEQGDVFSCSVMHEALHNHYTQKSLSLSPGK

SEQ ID NO: 1949 - protein, 479 aa, synthetic construct; identical to SEQ ID NO: 480
  source 1..479: note = XENP44332 Chain 2 - 1A7[CD28]_H1.14_L1.71_scFv(GKPGS)4_Fc(216)_IgG1_C220S/PVA_/ S267K/S364K/E357Q

SEQ ID NO: 1950 - protein, 213 aa, synthetic construct
  source 1..213: note = XENP44332 Chain 3 - CEA-A[CEACAM5]_L0
QTVLSQSPAILSASPGEKVTMTCRASSSVTYIHWYQQKPGSSPKSWIYATSNLASGVPARFSGSGSGTSYSLTISRVEAEDAATYYCQHWSSKPPTFGGGTKLEIKRTVAAPSVFIFPPSDEQLKSGTASVVCLLNNFYPREAKVQWKVDNALQSGNSQESVTEQDSKDSTYSLSSTLTLSKADYEKHKVYACEVTHQGLSSPVTKSFNRGEC

SEQ ID NO: 1951 - protein, 450 aa, synthetic construct
  source 1..450: note = XENP44333 Chain 1 - CEA-B[CEACAM5]_H1_IgG1_pI(-)_Isosteric_A_PVA_/S267K/L368D/K 370S
EVQLVESGGGLVQPGGSLRLSCAASGFNIKDTYMHWVRQAPGKGLEWVARIDPANGNSKYADSVKGRFTISADTSKNTAYLQMNSLRAEDTAVYYCAPFGYYVSDYAMAYWGQGTLVTVSSASTKGPSVFPLAPSSKSTSGGTAALGCLVKDYFPEPVTVSWNSGALTSGVHTFPAVLQSSGLYSLSSVVTVPSSSLGTQTYICNVNHKPSDTKVDKKVEPKSCDKTHTCPPCPAPPVAGPSVFLFPPKPKDTLMISRTPEVTCVVVDVKHEDPEVKFNWYVDGVEVHNAKTKPREEEYNSTYRVVSVLTVLHQDWLNGKEYKCKVSNKALPAPIEKTISKAKGQPREPQVYTLPPSREEMTKNQVSLTCDVSGFYPSDIAVEWESDGQPENNYKTTPPVLDSDGSFFLYSKLTVDKSRWEQGDVFSCSVMHEALHNHYTQKSLSLSPGK

SEQ ID NO: 1952 - protein, 479 aa, synthetic construct; identical to SEQ ID NO: 480
  source 1..479: note = XENP44333 Chain 2 - 1A7[CD28]_H1.14_L1.71_scFv(GKPGS)4_Fc(216)_IgG1_C220S/PVA_/ S267K/S364K/E357Q

SEQ ID NO: 1953 - protein, 218 aa, synthetic construct
  source 1..218: note = XENP44333 Chain 3 - CEA-B[CEACAM5]_L1
DIQLTQSPSSLSASVGDRVTITCRAGESVDIFGVGFLHWYQQKPGKAPKLLIYRASNLESGVPSRFSGSGSRTDFTLTISSLQPEDFATYYCQQTNEDPYTFGQGTKVEIKRTVAAPSVFIFPPSDEQLKSGTASVVCLLNNFYPREAKVQWKVDNALQSGNSQESVTEQDSKDSTYSLSSTLTLSKADYEKHKVYACEVTHQGLSSPVTKSFNRGEC

SEQ ID NO: 1954 - protein, 448 aa, synthetic construct; identical to SEQ ID NO: 1939
  source 1..448: note = XENP44335 Chain 1 - CEA-D[CEACAM5]_H1_IgG1_pI(-)_Isosteric_A_PVA_/S267K/L368D/K 370S

SEQ ID NO: 1955 - protein, 479 aa, synthetic construct
  source 1..479: note = XENP44335 Chain 2 - 1A7[CD28]_H1_L1.71_scFv(GKPGS)4_Fc(216)_IgG1_C220S/PVA_/S26 7K/S364K/E357Q
EVQLLESGGGLVQPGGSLRLSCAASGFTFSSYAMSWVRQAPGKGLEWVSTISGSGDSTYYADSVKGRFTISRDNSKNTLYLQMNSLRAEDTAVYYCAKSGPGLRQVGFDYWGQGTLVTVSSGKPGSGKPGSGKPGSGKPGSDIQMTQSPSSLSASVGDRVTITCRASQSISSYLNWYQQKPGKAPKLLIYAASSLQSGVPSRFSGSGSGTDFTLTISSLQPEDFATYYCQQVYSTPFTFGQGTKLEIKEPKSSDKTHTCPPCPAPPVAGPSVFLFPPKPKDTLMISRTPEVTCVVVDVKHEDPEVKFNWYVDGVEVHNAKTKPREEQYNSTYRVVSVLTVLHQDWLNGKEYKCKVSNKALPAPIEKTISKAKGQPREPQVYTLPPSREQMTKNQVKLTCLVKGFYPSDIAVEWESNGQPENNYKTTPPVLDSDGSFFLYSKLTVDKSRWQQGNVFSCSVMHEALHNHYTQKSLSLSPGK

SEQ ID NO: 1956 - protein, 213 aa, synthetic construct; identical to SEQ ID NO: 1941
  source 1..213: note = XENP44335 Chain 3 - CEA-D[CEACAM5]_L1

SEQ ID NO: 1957 - protein, 449 aa, synthetic construct; identical to SEQ ID NO: 1942
  source 1..449: note = XENP44336 Chain 1 - CEA-E[CEACAM5]_H1_IgG1_pI(-)_Isosteric_A_PVA_/S267K/L368D/K 370S

SEQ ID NO: 1958 - protein, 479 aa, synthetic construct; identical to SEQ ID NO: 1955
  source 1..479: note = XENP44336 Chain 2 - 1A7[CD28]_H1_L1.71_scFv(GKPGS)4_Fc(216)_IgG1_C220S/PVA_/S26 7K/S364K/E357Q

SEQ ID NO: 1959 - protein, 214 aa, synthetic construct; identical to SEQ ID NO: 1944
  source 1..214: note = XENP44336 Chain 3 - CEA-E[CEACAM5]_L1

SEQ ID NO: 1960 - protein, 450 aa, synthetic construct; identical to SEQ ID NO: 1945
  source 1..450: note = XENP44337 Chain 1 - CEA-F[CEACAM5]_H1_IgG1_pI(-)_Isosteric_A_PVA_/S267K/L368D/K 370S

SEQ ID NO: 1961 - protein, 479 aa, synthetic construct; identical to SEQ ID NO: 1955
  source 1..479: note = XENP44337 Chain 2 - 1A7[CD28]_H1_L1.71_scFv(GKPGS)4_Fc(216)_IgG1_C220S/PVA_/S26 7K/S364K/E357Q

SEQ ID NO: 1962 - protein, 215 aa, synthetic construct; identical to SEQ ID NO: 1947
  source 1..215: note = XENP44337 Chain 3 - CEA-F[CEACAM5]_L1

SEQ ID NO: 1963 - protein, 450 aa, synthetic construct; identical to SEQ ID NO: 1948
  source 1..450: note = XENP44338 Chain 1 - CEA-A[CEACAM5]_H0_IgG1_pI(-)_Isosteric_A_PVA_/S267K/L368D/K 370S

SEQ ID NO: 1964 - protein, 479 aa, synthetic construct; identical to SEQ ID NO: 1955
  source 1..479: note = XENP44338 Chain 2 - 1A7[CD28]_H1_L1.71_scFv(GKPGS)4_Fc(216)_IgG1_C220S/PVA_/S26 7K/S364K/E357Q

SEQ ID NO: 1965 - protein, 213 aa, synthetic construct; identical to SEQ ID NO: 1950
  source 1..213: note = XENP44338 Chain 3 - CEA-A[CEACAM5]_L0

SEQ ID NO: 1966 - protein, 450 aa, synthetic construct; identical to SEQ ID NO: 1951
  source 1..450: note = XENP44339 Chain 1 - CEA-B[CEACAM5]_H1_IgG1_pI(-)_Isosteric_A_PVA_/S267K/L368D/K 370S

SEQ ID NO: 1967 - protein, 479 aa, synthetic construct; identical to SEQ ID NO: 1955
  source 1..479: note = XENP44339 Chain 2 - 1A7[CD28]_H1_L1.71_scFv(GKPGS)4_Fc(216)_IgG1_C220S/PVA_/S26 7K/S364K/E357Q

SEQ ID NO: 1968 - protein, 218 aa, synthetic construct; identical to SEQ ID NO: 1953
  source 1..218: note = XENP44339 Chain 3 - CEA-B[CEACAM5]_L1

SEQ ID NO: 1969 - protein, 450 aa, synthetic construct; identical to SEQ ID NO: 1948
  source 1..450: note = XENP44560 Chain 1 - CEA-A[CEACAM5]_H0_IgG1_pI(-)_Isosteric_A_PVA_/S267K/L368D/K 370S

SEQ ID NO: 1970 - protein, 479 aa, synthetic construct
  source 1..479: note = XENP44560 Chain 2 - 1A7[CD28]_H1.1_L1.71_scFv(GKPGS)4_Fc(216)_IgG1_C220S/PVA_/S 267K/S364K/E357Q
EVQLLESGGGLVQPGGSLRLSCAASGFTFSSYYMSWVRQAPGKGLEWVSTISGSGDSTYYADSVKGRFTISRDNSKNTLYLQMNSLRAEDTAVYYCAKSGPGLRQVGFDYWGQGTLVTVSSGKPGSGKPGSGKPGSGKPGSDIQMTQSPSSLSASVGDRVTITCRASQSISSYLNWYQQKPGKAPKLLIYAASSLQSGVPSRFSGSGSGTDFTLTISSLQPEDFATYYCQQVYSTPFTFGQGTKLEIKEPKSSDKTHTCPPCPAPPVAGPSVFLFPPKPKDTLMISRTPEVTCVVVDVKHEDPEVKFNWYVDGVEVHNAKTKPREEQYNSTYRVVSVLTVLHQDWLNGKEYKCKVSNKALPAPIEKTISKAKGQPREPQVYTLPPSREQMTKNQVKLTCLVKGFYPSDIAVEWESNGQPENNYKTTPPVLDSDGSFFLYSKLTVDKSRWQQGNVFSCSVLHEALHSHYTQKSLSLSPGK

SEQ ID NO: 1971 - protein, 213 aa, synthetic construct; identical to SEQ ID NO: 1950
  source 1..213: note = XENP44560 Chain 3 - CEA-A[CEACAM5]_L0

SEQ ID NO: 1972 - protein, 450 aa, synthetic construct; identical to SEQ ID NO: 1948
  source 1..450: note = XENP44561 Chain 1 - CEA-A[CEACAM5]_H0_IgG1_pI(-)_Isosteric_A_PVA_/S267K/L368D/K 370S

SEQ ID NO: 1973 - protein, 479 aa, synthetic construct
  source 1..479: note = XENP44561 Chain 2 - 1A7[CD28]_H1.14_L1_scFv(GKPGS)4_Fc(216)_IgG1_C220S/PVA_/S26 7K/S364K/E357Q
EVQLLESGGGLVQPGGSLRLSCAASGFTFSSYYMSWVRQAPGKGLEWVSTISESGDSTYYADSVKGRFTISRDNSKNTLYLQMNSLRAEDTAVYYCAKSGPGLRQVGFDYWGQGTLVTVSSGKPGSGKPGSGKPGSGKPGSDIQMTQSPSSLSASVGDRVTITCRASQSISSYLNWYQQKPGKAPKLLIYAASSLQSGVPSRFSGSGSGTDFTLTISSLQPEDFATYYCQQSYSTPFTFGQGTKLEIKEPKSSDKTHTCPPCPAPPVAGPSVFLFPPKPKDTLMISRTPEVTCVVVDVKHEDPEVKFNWYVDGVEVHNAKTKPREEQYNSTYRVVSVLTVLHQDWLNGKEYKCKVSNKALPAPIEKTISKAKGQPREPQVYTLPPSREQMTKNQVKLTCLVKGFYPSDIAVEWESNGQPENNYKTTPPVLDSDGSFFLYSKLTVDKSRWQQGNVFSCSVLHEALHSHYTQKSLSLSPGK

SEQ ID NO: 1974 - protein, 213 aa, synthetic construct; identical to SEQ ID NO: 1950
  source 1..213: note = XENP44561 Chain 3 - CEA-A[CEACAM5]_L0

SEQ ID NO: 1975 - protein, 450 aa, synthetic construct; identical to SEQ ID NO: 1948
  source 1..450: note = XENP44562 Chain 1 - CEA-A[CEACAM5]_H0_IgG1_pI(-)_Isosteric_A_PVA_/S267K/L368D/K 370S

SEQ ID NO: 1976 - protein, 479 aa, synthetic construct; identical to SEQ ID NO: 498
  source 1..479: note = XENP44562 Chain 2 - 1A7[CD28]_H1.14_L1.71_VH_G46C_VL_Q108C_scFv(GKPGS)4_Fc(216) _IgG1_C220S/PVA_/S267K/S364K/E357Q

SEQ ID NO: 1977 - protein, 213 aa, synthetic construct; identical to SEQ ID NO: 1950
  source 1..213: note = XENP44562 Chain 3 - CEA-A[CEACAM5]_L0

SEQ ID NO: 1978 - protein, 450 aa, synthetic construct; identical to SEQ ID NO: 1948
  source 1..450: note = XENP44563 Chain 1 - CEA-A[CEACAM5]_H0_IgG1_pI(-)_Isosteric_A_PVA_/S267K/L368D/K 370S

SEQ ID NO: 1979 - protein, 479 aa, synthetic construct
  source 1..479: note = XENP44563 Chain 2 - 1A7[CD28]_L1.71_H1.14_VH_G46C_VL_Q108C_scFv(GKPGS)4_Fc(216) _IgG1_C220S/PVA_/S267K/S364K/E357Q
DIQMTQSPSSLSASVGDRVTITCRASQSISSYLNWYQQKPGKAPKLLIYAASSLQSGVPSRFSGSGSGTDFTLTISSLQPEDFATYYCQQVYSTPFTFGCGTKLEIKGKPGSGKPGSGKPGSGKPGSEVQLLESGGGLVQPGGSLRLSCAASGFTFSSYYMSWVRQAPGKCLEWVSTISESGDSTYYADSVKGRFTISRDNSKNTLYLQMNSLRAEDTAVYYCAKSGPGLRQVGFDYWGQGTLVTVSSEPKSSDKTHTCPPCPAPPVAGPSVFLFPPKPKDTLMISRTPEVTCVVVDVKHEDPEVKFNWYVDGVEVHNAKTKPREEQYNSTYRVVSVLTVLHQDWLNGKEYKCKVSNKALPAPIEKTISKAKGQPREPQVYTLPPSREQMTKNQVKLTCLVKGFYPSDIAVEWESNGQPENNYKTTPPVLDSDGSFFLYSKLTVDKSRWQQGNVFSCSVMHEALHNHYTQKSLSLSPGK

SEQ ID NO: 1980 - protein, 213 aa, synthetic construct; identical to SEQ ID NO: 1950
  source 1..213: note = XENP44563 Chain 3 - CEA-A[CEACAM5]_L0

SEQ ID NO: 1981 - protein, 450 aa, synthetic construct
  source 1..450: note = XENP44666 Chain 1 - CEA-A[CEACAM5]_H1_IgG1_pI(-)_Isosteric_A_PVA_/S267K/L368D/K 370S/M428L/N434S
EVQLVESGGGLVQPGGSLRLSCATSGFTFTDYYMNWVRQAPGKALEWVGFIGNKANGYTTEYSASVKGRFTISRDKSKSSLYLQMNSLKTEDTAVYYCTRDRGLRFYFDYWGQGTLVTVSSASTKGPSVFPLAPSSKSTSGGTAALGCLVKDYFPEPVTVSWNSGALTSGVHTFPAVLQSSGLYSLSSVVTVPSSSLGTQTYICNVNHKPSDTKVDKKVEPKSCDKTHTCPPCPAPPVAGPSVFLFPPKPKDTLMISRTPEVTCVVVDVKHEDPEVKFNWYVDGVEVHNAKTKPREEEYNSTYRVVSVLTVLHQDWLNGKEYKCKVSNKALPAPIEKTISKAKGQPREPQVYTLPPSREEMTKNQVSLTCDVSGFYPSDIAVEWESDGQPENNYKTTPPVLDSDGSFFLYSKLTVDKSRWEQGDVFSCSVLHEALHSHYTQKSLSLSPGK

SEQ ID NO: 1982 - protein, 479 aa, synthetic construct; identical to SEQ ID NO: 714
  source 1..479: note = XENP44666 Chain 2 - 1A7[CD28]_H1.14_L1.71_scFv(GKPGS)4_Fc(216)_IgG1_C220S/PVA_/ S267K/S364K/E357Q/M428L/N434S

SEQ ID NO: 1983 - protein, 213 aa, synthetic construct
  source 1..213: note = XENP44666 Chain 3 - CEA-A[CEACAM5]_L1
QTVLTQSPATLSLSPGERATLSCRASSSVTYIHWYQQKPGQSPRSLIYATSNLASGVPARFSGSGSGTDYTLTISSLEPEDFAVYYCQHWSSKPPTFGGGTKVEIKRTVAAPSVFIFPPSDEQLKSGTASVVCLLNNFYPREAKVQWKVDNALQSGNSQESVTEQDSKDSTYSLSSTLTLSKADYEKHKVYACEVTHQGLSSPVTKSFNRGEC

SEQ ID NO: 1984 - protein, 450 aa, synthetic construct; identical to SEQ ID NO: 1981
  source 1..450: note = XENP44667 Chain 1 - CEA-A[CEACAM5]_H1_IgG1_pI(-)_Isosteric_A_PVA_/S267K/L368D/K 370S/M428L/N434S

SEQ ID NO: 1985 - protein, 479 aa, synthetic construct
  source 1..479: note = XENP44667 Chain 2 - 1A7[CD28]_H1_L1.71_scFv(GKPGS)4_Fc(216)_IgG1_C220S/PVA_/S26 7K/S364K/E357Q/M428L/N434S
EVQLLESGGGLVQPGGSLRLSCAASGFTFSSYAMSWVRQAPGKGLEWVSTISGSGDSTYYADSVKGRFTISRDNSKNTLYLQMNSLRAEDTAVYYCAKSGPGLRQVGFDYWGQGTLVTVSSGKPGSGKPGSGKPGSGKPGSDIQMTQSPSSLSASVGDRVTITCRASQSISSYLNWYQQKPGKAPKLLIYAASSLQSGVPSRFSGSGSGTDFTLTISSLQPEDFATYYCQQVYSTPFTFGQGTKLEIKEPKSSDKTHTCPPCPAPPVAGPSVFLFPPKPKDTLMISRTPEVTCVVVDVKHEDPEVKFNWYVDGVEVHNAKTKPREEQYNSTYRVVSVLTVLHQDWLNGKEYKCKVSNKALPAPIEKTISKAKGQPREPQVYTLPPSREQMTKNQVKLTCLVKGFYPSDIAVEWESNGQPENNYKTTPPVLDSDGSFFLYSKLTVDKSRWQQGNVFSCSVLHEALHSHYTQKSLSLSPGK

SEQ ID NO: 1986 - protein, 213 aa, synthetic construct; identical to SEQ ID NO: 1983
  source 1..213: note = XENP44667 Chain 3 - CEA-A[CEACAM5]_L1

SEQ ID NO: 1987 - protein, 450 aa, synthetic construct; identical to SEQ ID NO: 1981
  source 1..450: note = XENP44669 Chain 1 - CEA-A[CEACAM5]_H1_IgG1_pI(-)_Isosteric_A_PVA_/S267K/L368D/K 370S/M428L/N434S

SEQ ID NO: 1988 - protein, 479 aa, synthetic construct; identical to SEQ ID NO: 519
  source 1..479: note = XENP44669 Chain 2 - 1A7[CD28]_H1.14_L1.71_VH_G46C_VL_Q108C_scFv(GKPGS)4_Fc(216) _IgG1_C220S/PVA_/S267K/S364K/E357Q/M428L/N434S

SEQ ID NO: 1989 - protein, 213 aa, synthetic construct; identical to SEQ ID NO: 1983
  source 1..213: note = XENP44669 Chain 3 - CEA-A[CEACAM5]_L1

SEQ ID NO: 1990 - protein, 450 aa, synthetic construct; identical to SEQ ID NO: 1981
  source 1..450: note = XENP44670 Chain 1 - CEA-A[CEACAM5]_H1_IgG1_pI(-)_Isosteric_A_PVA_/S267K/L368D/K 370S/M428L/N434S

SEQ ID NO: 1991 - protein, 477 aa, synthetic construct
  source 1..477: note = XENP44670 Chain 2 - 1A7[CD28]_H1.14_L1.71_VH_K43C_VL_Q103C_scFv(staple)_Fc(216) _IgG1_C220S/PVA_/S267K/S364K/E357Q/M428L/N434S
EVQLLESGGGLVQPGGSLRLSCAASGFTFSSYYMSWVRQAPGCGLEWVSTISESGDSTYYADSVKGRFTISRDNSKNTLYLQMNSLRAEDTAVYYCAKSGPGLRQVGFDYWGQGTLVTVSSGGGSGGSGGCPPCGGSGGDIQMTQSPSSLSASVGDRVTITCRASQSISSYLNWYQQKPGKAPKLLIYAASSLQSGVPSRFSGSGSGTDFTLTISSLQPEDFATYYCQQVYSTPFTFGCGTKLEIKEPKSSDKTHTCPPCPAPPVAGPSVFLFPPKPKDTLMISRTPEVTCVVVDVKHEDPEVKFNWYVDGVEVHNAKTKPREEQYNSTYRVVSVLTVLHQDWLNGKEYKCKVSNKALPAPIEKTISKAKGQPREPQVYTLPPSREQMTKNQVKLTCLVKGFYPSDIAVEWESNGQPENNYKTTPPVLDSDGSFFLYSKLTVDKSRWQQGNVFSCSVLHEALHSHYTQKSLSLSPGK

SEQ ID NO: 1992 - protein, 213 aa, synthetic construct; identical to SEQ ID NO: 1983
  source 1..213: note = XENP44670 Chain 3 - CEA-A[CEACAM5]_L1

SEQ ID NO: 1993 - protein, 450 aa, synthetic construct
  source 1..450: note = XENP44671 Chain 1 - CEA-A[CEACAM5]_H1_IgG1_pI(-)_Isosteric_A_C220S/PVA_/S267K/L 368D/K370S/M428L/N434S
EVQLVESGGGLVQPGGSLRLSCATSGFTFTDYYMNWVRQAPGKALEWVGFIGNKANGYTTEYSASVKGRFTISRDKSKSSLYLQMNSLKTEDTAVYYCTRDRGLRFYFDYWGQGTLVTVSSASTKGPSVFPLAPSSKSTSGGTAALGCLVKDYFPEPVTVSWNSGALTSGVHTFPAVLQSSGLYSLSSVVTVPSSSLGTQTYICNVNHKPSNTKVDKKVEPKSCDKTHTCPPCPAPPVAGPSVFLFPPKPKDTLMISRTPEVTCVVVDVKHEDPEVKFNWYVDGVEVHNAKTKPREEQYNSTYRVVSVLTVLHQDWLNGKEYKCKVSNKALPAPIEKTISKAKGQPREPQVYTLPPSREQMTKNQVKLTCLVKGFYPSDIAVEWESNGQPENNYKTTPPVLDSDGSFFLYSKLTVDKSRWQQGNVFSCSVLHEALHSHYTQKSLSLSPGK

SEQ ID NO: 1994 - protein, 477 aa, synthetic construct
  source 1..477: note = XENP44671 Chain 2 - 1A7[CD28]_H1.14_L1.71_VH_K43C_VL_Q103C_scFv(staple)_Fc(216) _IgG1_pI(-)_Isosteric_A_C220S/PVA_/S267K/L368D/K370S/M428L/ N434S
EVQLLESGGGLVQPGGSLRLSCAASGFTFSSYYMSWVRQAPGCGLEWVSTISESGDSTYYADSVKGRFTISRDNSKNTLYLQMNSLRAEDTAVYYCAKSGPGLRQVGFDYWGQGTLVTVSSGGGSGGSGGCPPCGGSGGDIQMTQSPSSLSASVGDRVTITCRASQSISSYLNWYQQKPGKAPKLLIYAASSLQSGVPSRFSGSGSGTDFTLTISSLQPEDFATYYCQQVYSTPFTFGCGTKLEIKEPKSSDKTHTCPPCPAPPVAGPSVFLFPPKPKDTLMISRTPEVTCVVVDVKHEDPEVKFNWYVDGVEVHNAKTKPREEEYNSTYRVVSVLTVLHQDWLNGKEYKCKVSNKALPAPIEKTISKAKGQPREPQVYTLPPSREEMTKNQVSLTCDVSGFYPSDIAVEWESDGQPENNYKTTPPVLDSDGSFFLYSKLTVDKSRWEQGDVFSCSVLHEALHSHYTQKSLSLSPGK

SEQ ID NO: 1995 - protein, 213 aa, synthetic construct; identical to SEQ ID NO: 1983
  source 1..213: note = XENP44671 Chain 3 - CEA-A[CEACAM5]_L1

SEQ ID NO: 1996 - protein, 449 aa, synthetic construct
  source 1..449: note = XENP44732 Chain 1 - CEA-C[CEACAM5]_H0_IgG1_pI(-)_Isosteric_A_PVA_/S267K/L368D/K 370S
QVKLQQSGAELVRSGTSVKLSCTASGFNIKDSYMHWLRQGPEQGLEWIGWIDPENGDTEYAPKFQGKATFTTDTSSNTAYLQLSSLTSEDTAVYYCNEGTPTGPYYFDYWGQGTTVTVSSASTKGPSVFPLAPSSKSTSGGTAALGCLVKDYFPEPVTVSWNSGALTSGVHTFPAVLQSSGLYSLSSVVTVPSSSLGTQTYICNVNHKPSDTKVDKKVEPKSCDKTHTCPPCPAPPVAGPSVFLFPPKPKDTLMISRTPEVTCVVVDVKHEDPEVKFNWYVDGVEVHNAKTKPREEEYNSTYRVVSVLTVLHQDWLNGKEYKCKVSNKALPAPIEKTISKAKGQPREPQVYTLPPSREEMTKNQVSLTCDVSGFYPSDIAVEWESDGQPENNYKTTPPVLDSDGSFFLYSKLTVDKSRWEQGDVFSCSVMHEALHNHYTQKSLSLSPGK

SEQ ID NO: 1997 - protein, 479 aa, synthetic construct; identical to SEQ ID NO: 1955
  source 1..479: note = XENP44732 Chain 2 - 1A7[CD28]_H1_L1.71_scFv(GKPGS)4_Fc(216)_IgG1_C220S/PVA_/S26 7K/S364K/E357Q

SEQ ID NO: 1998 - protein, 213 aa, synthetic construct
  source 1..213: note = XENP44732 Chain 3 - CEA-C[CEACAM5]_L0
ENVLTQSPAIMSASPGEKVTITCSASSSVSYMHWFQQKPGTSPKLWIYSTSNLASGVPARFSGSGSGTSYSLTISRMEAEDAATYYCQQRSSYPLTFGAGTKLELKRTVAAPSVFIFPPSDEQLKSGTASVVCLLNNFYPREAKVQWKVDNALQSGNSQESVTEQDSKDSTYSLSSTLTLSKADYEKHKVYACEVTHQGLSSPVTKSFNRGEC

SEQ ID NO: 1999 - protein, 449 aa, synthetic construct
  source 1..449: note = XENP44734 Chain 1 - CEA-C[CEACAM5]_H1_IgG1_pI(-)_Isosteric_A_PVA_/S267K/L368D/K 370S
QVQLVQSGAEVKKPGASVKVSCKASGFNIKDSYMHWLRQAPGQGLEWMGWIDPENGDTEYAPKFQGRVTMTTDTSINTAYMELSRLRSDDTAVYYCNEGTPTGPYYFDYWGQGTLVTVSSASTKGPSVFPLAPSSKSTSGGTAALGCLVKDYFPEPVTVSWNSGALTSGVHTFPAVLQSSGLYSLSSVVTVPSSSLGTQTYICNVNHKPSDTKVDKKVEPKSCDKTHTCPPCPAPPVAGPSVFLFPPKPKDTLMISRTPEVTCVVVDVKHEDPEVKFNWYVDGVEVHNAKTKPREEEYNSTYRVVSVLTVLHQDWLNGKEYKCKVSNKALPAPIEKTISKAKGQPREPQVYTLPPSREEMTKNQVSLTCDVSGFYPSDIAVEWESDGQPENNYKTTPPVLDSDGSFFLYSKLTVDKSRWEQGDVFSCSVMHEALHNHYTQKSLSLSPGK

SEQ ID NO: 2000 - protein, 479 aa, synthetic construct; identical to SEQ ID NO: 1955
  source 1..479: note = XENP44734 Chain 2 - 1A7[CD28]_H1_L1.71_scFv(GKPGS)4_Fc(216)_IgG1_C220S/PVA_/S26 7K/S364K/E357Q

SEQ ID NO: 2001 - protein, 213 aa, synthetic construct
  source 1..213: note = XENP44734 Chain 3 - CEA-C[CEACAM5]_L1
ENVLTQSPATLSLSPGERATLSCRASSSVSYMHWFQQKPGQSPRLLIYSTSNLASGVPARFSGSGSGTDYTLTISSLEPEDFAVYYCQQRSSYPLTFGAGTKVEIKRTVAAPSVFIFPPSDEQLKSGTASVVCLLNNFYPREAKVQWKVDNALQSGNSQESVTEQDSKDSTYSLSSTLTLSKADYEKHKVYACEVTHQGLSSPVTKSFNRGEC

SEQ ID NO: 2002 - protein, 450 aa, synthetic construct
  source 1..450: note = XENP44755 Chain 1 - CEA-A[CEACAM5]_H1_IgG1_pI(-)_Isosteric_A_PVA_/S267K/L368D/K 370S
EVQLVESGGGLVQPGGSLRLSCATSGFTFTDYYMNWVRQAPGKALEWVGFIGNKANGYTTEYSASVKGRFTISRDKSKSSLYLQMNSLKTEDTAVYYCTRDRGLRFYFDYWGQGTLVTVSSASTKGPSVFPLAPSSKSTSGGTAALGCLVKDYFPEPVTVSWNSGALTSGVHTFPAVLQSSGLYSLSSVVTVPSSSLGTQTYICNVNHKPSDTKVDKKVEPKSCDKTHTCPPCPAPPVAGPSVFLFPPKPKDTLMISRTPEVTCVVVDVKHEDPEVKFNWYVDGVEVHNAKTKPREEEYNSTYRVVSVLTVLHQDWLNGKEYKCKVSNKALPAPIEKTISKAKGQPREPQVYTLPPSREEMTKNQVSLTCDVSGFYPSDIAVEWESDGQPENNYKTTPPVLDSDGSFFLYSKLTVDKSRWEQGDVFSCSVMHEALHNHYTQKSLSLSPGK

SEQ ID NO: 2003 - protein, 479 aa, synthetic construct; identical to SEQ ID NO: 1955
  source 1..479: note = XENP44755 Chain 2 - 1A7[CD28]_H1_L1.71_scFv(GKPGS)4_Fc(216)_IgG1_C220S/PVA_/S26 7K/S364K/E357Q

SEQ ID NO: 2004 - protein, 213 aa, synthetic construct; identical to SEQ ID NO: 1983
  source 1..213: note = XENP44755 Chain 3 - CEA-A[CEACAM5]_L1

SEQ ID NO: 2005 - protein, 450 aa, synthetic construct; identical to SEQ ID NO: 2002
  source 1..450: note = XENP44756 Chain 1 - CEA-A[CEACAM5]_H1_IgG1_pI(-)_Isosteric_A_PVA_/S267K/L368D/K 370S

SEQ ID NO: 2006 - protein, 479 aa, synthetic construct; identical to SEQ ID NO: 1955
  source 1..479: note = XENP44756 Chain 2 - 1A7[CD28]_H1_L1.71_scFv(GKPGS)4_Fc(216)_IgG1_C220S/PVA_/S26 7K/S364K/E357Q

SEQ ID NO: 2007 - protein, 213 aa, synthetic construct
  source 1..213: note = XENP44756 Chain 3 - CEA-A[CEACAM5]_L2
EIVLTQSPATLSLSPGERATLSCRASSSVTYIHWYQQKPGQAPRLLIYATSNLASGIPARFSGSGSGTDFTLTISSLEPEDFAVYYCQHWSSKPPTFGGGTKVEIKRTVAAPSVFIFPPSDEQLKSGTASVVCLLNNFYPREAKVQWKVDNALQSGNSQESVTEQDSKDSTYSLSSTLTLSKADYEKHKVYACEVTHQGLSSPVTKSFNRGEC

SEQ ID NO: 2008 - protein, 450 aa, synthetic construct; identical to SEQ ID NO: 1981
  source 1..450: note = XENP44849 Chain 1 - CEA-A[CEACAM5]_H1_IgG1_pI(-)_Isosteric_A_PVA_/S267K/L368D/K 370S/M428L/N434S

SEQ ID NO: 2009 - protein, 479 aa, synthetic construct; identical to SEQ ID NO: 519
  source 1..479: note = XENP44849 Chain 2 - 1A7[CD28]_H1.14_L1.71_VH_G46C_VL_Q108C_scFv(GKPGS)4_Fc(216) _IgG1_C220S/PVA_/S267K/S364K/E357Q/M428L/N434S

SEQ ID NO: 2010 - protein, 213 aa, synthetic construct; identical to SEQ ID NO: 2007
  source 1..213: note = XENP44849 Chain 3 - CEA-A[CEACAM5]_L2

SEQ ID NO: 2011 - protein, 450 aa, synthetic construct; identical to SEQ ID NO: 1981
  source 1..450: note = XENP44889 Chain 1 - CEA-A[CEACAM5]_H1_IgG1_pI(-)_Isosteric_A_PVA_/S267K/L368D/K 370S/M428L/N434S

SEQ ID NO: 2012 - protein, 479 aa, synthetic construct; identical to SEQ ID NO: 519
  source 1..479: note = XENP44889 Chain 2 - 1A7[CD28]_H1.14_L1.71_VH_G46C_VL_Q108C_scFv(GKPGS)4_Fc(216) _IgG1_C220S/PVA_/S267K/S364K/E357Q/M428L/N434S

SEQ ID NO: 2013 - protein, 213 aa, synthetic construct
  source 1..213: note = XENP44889 Chain 3 - CEA-A[CEACAM5]_L1.2
QTVLTQSPATLSLSPGERATLSCRASSSVTYIHWYQQKPGQSPKSLIYATSNLASGVPARFSGSGSGTDYTLTISSLEPEDFAVYYCQHWSSKPPTFGGGTKVEIKRTVAAPSVFIFPPSDEQLKSGTASVVCLLNNFYPREAKVQWKVDNALQSGNSQESVTEQDSKDSTYSLSSTLTLSKADYEKHKVYACEVTHQGLSSPVTKSFNRGEC

SEQ ID NO: 2014 - protein, 450 aa, synthetic construct; identical to SEQ ID NO: 1981
  source 1..450: note = XENP44890 Chain 1 - CEA-A[CEACAM5]_H1_IgG1_pI(-)_Isosteric_A_PVA_/S267K/L368D/K 370S/M428L/N434S

SEQ ID NO: 2015 - protein, 479 aa, synthetic construct; identical to SEQ ID NO: 519
  source 1..479: note = XENP44890 Chain 2 - 1A7[CD28]_H1.14_L1.71_VH_G46C_VL_Q108C_scFv(GKPGS)4_Fc(216) _IgG1_C220S/PVA_/S267K/S364K/E357Q/M428L/N434S

SEQ ID NO: 2016 - protein, 213 aa, synthetic construct
  source 1..213: note = XENP44890 Chain 3 - CEA-A[CEACAM5]_L1.3
QTVLTQSPATLSLSPGERATLSCRASSSVTYIHWYQQKPGQSPRSWIYATSNLASGVPARFSGSGSGTDYTLTISSLEPEDFAVYYCQHWSSKPPTFGGGTKVEIKRTVAAPSVFIFPPSDEQLKSGTASVVCLLNNFYPREAKVQWKVDNALQSGNSQESVTEQDSKDSTYSLSSTLTLSKADYEKHKVYACEVTHQGLSSPVTKSFNRGEC

SEQ ID NO: 2017 - protein, 450 aa, synthetic construct; identical to SEQ ID NO: 1981
  source 1..450: note = XENP44891 Chain 1 - CEA-A[CEACAM5]_H1_IgG1_pI(-)_Isosteric_A_PVA_/S267K/L368D/K 370S/M428L/N434S

SEQ ID NO: 2018 - protein, 479 aa, synthetic construct; identical to SEQ ID NO: 519
  source 1..479: note = XENP44891 Chain 2 - 1A7[CD28]_H1.14_L1.71_VH_G46C_VL_Q108C_scFv(GKPGS)4_Fc(216) _IgG1_C220S/PVA_/S267K/S364K/E357Q/M428L/N434S

SEQ ID NO: 2019 - protein, 213 aa, synthetic construct
  source 1..213: note = XENP44891 Chain 3 - CEA-A[CEACAM5]_L2.5
EIVLTQSPATLSLSPGERATLSCRASSSVTYIHWYQQKPGQAPRSLIYATSNLASGIPARFSGSGSGTDFTLTISSLEPEDFAVYYCQHWSSKPPTFGGGTKVEIKRTVAAPSVFIFPPSDEQLKSGTASVVCLLNNFYPREAKVQWKVDNALQSGNSQESVTEQDSKDSTYSLSSTLTLSKADYEKHKVYACEVTHQGLSSPVTKSFNRGEC

SEQ ID NO: 2020 - protein, 450 aa, synthetic construct; identical to SEQ ID NO: 1981
  source 1..450: note = XENP44892 Chain 1 - CEA-A[CEACAM5]_H1_IgG1_pI(-)_Isosteric_A_PVA_/S267K/L368D/K 370S/M428L/N434S

SEQ ID NO: 2021 - protein, 479 aa, synthetic construct; identical to SEQ ID NO: 519
  source 1..479: note = XENP44892 Chain 2 - 1A7[CD28]_H1.14_L1.71_VH_G46C_VL_Q108C_scFv(GKPGS)4_Fc(216) _IgG1_C220S/PVA_/S267K/S364K/E357Q/M428L/N434S

SEQ ID NO: 2022 - protein, 213 aa, synthetic construct
  source 1..213: note = XENP44892 Chain 3 - CEA-A[CEACAM5]_L2.8
EIVLTQSPATLSLSPGERATLSCRASSSVTYIHWYQQKPGQAPRSWIYATSNLASGIPARFSGSGSGTDFTLTISSLEPEDFAVYYCQHWSSKPPTFGGGTKVEIKRTVAAPSVFIFPPSDEQLKSGTASVVCLLNNFYPREAKVQWKVDNALQSGNSQESVTEQDSKDSTYSLSSTLTLSKADYEKHKVYACEVTHQGLSSPVTKSFNRGEC

SEQ ID NO: 2023 - protein, 450 aa, synthetic construct; identical to SEQ ID NO: 1981
  source 1..450: note = XENP44893 Chain 1 - CEA-A[CEACAM5]_H1_IgG1_pI(-)_Isosteric_A_PVA_/S267K/L368D/K 370S/M428L/N434S

SEQ ID NO: 2024 - protein, 479 aa, synthetic construct; identical to SEQ ID NO: 519
  source 1..479: note = XENP44893 Chain 2 - 1A7[CD28]_H1.14_L1.71_VH_G46C_VL_Q108C_scFv(GKPGS)4_Fc(216) _IgG1_C220S/PVA_/S267K/S364K/E357Q/M428L/N434S

SEQ ID NO: 2025 - protein, 213 aa, synthetic construct
  source 1..213: note = XENP44893 Chain 3 - CEA-A[CEACAM5]_L2.9
EIVLTQSPATLSLSPGERATLSCRASSSVTYIHWYQQKPGQAPKSWIYATSNLASGIPARFSGSGSGTDFTLTISSLEPEDFAVYYCQHWSSKPPTFGGGTKVEIKRTVAAPSVFIFPPSDEQLKSGTASVVCLLNNFYPREAKVQWKVDNALQSGNSQESVTEQDSKDSTYSLSSTLTLSKADYEKHKVYACEVTHQGLSSPVTKSFNRGEC

SEQ ID NO: 2026 - protein, 450 aa, synthetic construct; identical to SEQ ID NO: 1993
  source 1..450: note = XENP44894 Chain 1 - CEA-A[CEACAM5]_H1_IgG1_pI(-)_Isosteric_A_C220S/PVA_/S267K/L 368D/K370S/M428L/N434S

SEQ ID NO: 2027 - protein, 479 aa, synthetic construct
  source 1..479: note = XENP44894 Chain 2 - 1A7[CD28]_H1_L1.71_scFv(G4A)4_Fc(216)_IgG1_pI(-)_Isosteric_ A_C220S/PVA_/S267K/L368D/K370S/M428L/N434S
EVQLLESGGGLVQPGGSLRLSCAASGFTFSSYAMSWVRQAPGKGLEWVSTISGSGDSTYYADSVKGRFTISRDNSKNTLYLQMNSLRAEDTAVYYCAKSGPGLRQVGFDYWGQGTLVTVSSGGGGAGGGGAGGGGAGGGGADIQMTQSPSSLSASVGDRVTITCRASQSISSYLNWYQQKPGKAPKLLIYAASSLQSGVPSRFSGSGSGTDFTLTISSLQPEDFATYYCQQVYSTPFTFGQGTKLEIKEPKSSDKTHTCPPCPAPPVAGPSVFLFPPKPKDTLMISRTPEVTCVVVDVKHEDPEVKFNWYVDGVEVHNAKTKPREEEYNSTYRVVSVLTVLHQDWLNGKEYKCKVSNKALPAPIEKTISKAKGQPREPQVYTLPPSREEMTKNQVSLTCDVSGFYPSDIAVEWESDGQPENNYKTTPPVLDSDGSFFLYSKLTVDKSRWEQGDVFSCSVLHEALHSHYTQKSLSLSPGK

SEQ ID NO: 2028 - protein, 213 aa, synthetic construct; identical to SEQ ID NO: 1983
  source 1..213: note = XENP44894 Chain 3 - CEA-A[CEACAM5]_L1

SEQ ID NO: 2029 - protein, 450 aa, synthetic construct; identical to SEQ ID NO: 1993
  source 1..450: note = XENP44895 Chain 1 - CEA-A[CEACAM5]_H1_IgG1_pI(-)_Isosteric_A_C220S/PVA_/S267K/L 368D/K370S/M428L/N434S

SEQ ID NO: 2030 - protein, 479 aa, synthetic construct
  source 1..479: note = XENP44895 Chain 2 - 1A7[CD28]_H1.14_L1.71_VH_G46C_VL_Q108C_scFv(G4A)4_Fc(216)_I gG1_pI(-)_Isosteric_A_C220S/PVA_/S267K/L368D/K370S/M428L/N4 34S
EVQLLESGGGLVQPGGSLRLSCAASGFTFSSYYMSWVRQAPGKCLEWVSTISESGDSTYYADSVKGRFTISRDNSKNTLYLQMNSLRAEDTAVYYCAKSGPGLRQVGFDYWGQGTLVTVSSGGGGAGGGGAGGGGAGGGGADIQMTQSPSSLSASVGDRVTITCRASQSISSYLNWYQQKPGKAPKLLIYAASSLQSGVPSRFSGSGSGTDFTLTISSLQPEDFATYYCQQVYSTPFTFGCGTKLEIKEPKSSDKTHTCPPCPAPPVAGPSVFLFPPKPKDTLMISRTPEVTCVVVDVKHEDPEVKFNWYVDGVEVHNAKTKPREEEYNSTYRVVSVLTVLHQDWLNGKEYKCKVSNKALPAPIEKTISKAKGQPREPQVYTLPPSREEMTKNQVSLTCDVSGFYPSDIAVEWESDGQPENNYKTTPPVLDSDGSFFLYSKLTVDKSRWEQGDVFSCSVLHEALHSHYTQKSLSLSPGK

SEQ ID NO: 2031 - protein, 213 aa, synthetic construct; identical to SEQ ID NO: 1983
  source 1..213: note = XENP44895 Chain 3 - CEA-A[CEACAM5]_L1

SEQ ID NO: 2032 - protein, 450 aa, synthetic construct; identical to SEQ ID NO: 1993
  source 1..450: note = XENP44896 Chain 1 - CEA-A[CEACAM5]_H1_IgG1_pI(-)_Isosteric_A_C220S/PVA_/S267K/L 368D/K370S/M428L/N434S

SEQ ID NO: 2033 - protein, 479 aa, synthetic construct
  source 1..479: note = XENP44896 Chain 2 - 1A7[CD28]_L1.71_H1.14_VH_G46C_VL_Q108C_scFv(G4A)4_Fc(216)_I gG1_pI(-)_Isosteric_A_C220S/PVA_/S267K/L368D/K370S/M428L/N4 34S
DIQMTQSPSSLSASVGDRVTITCRASQSISSYLNWYQQKPGKAPKLLIYAASSLQSGVPSRFSGSGSGTDFTLTISSLQPEDFATYYCQQVYSTPFTFGCGTKLEIKGGGGAGGGGAGGGGAGGGGAEVQLLESGGGLVQPGGSLRLSCAASGFTFSSYYMSWVRQAPGKCLEWVSTISESGDSTYYADSVKGRFTISRDNSKNTLYLQMNSLRAEDTAVYYCAKSGPGLRQVGFDYWGQGTLVTVSSEPKSSDKTHTCPPCPAPPVAGPSVFLFPPKPKDTLMISRTPEVTCVVVDVKHEDPEVKFNWYVDGVEVHNAKTKPREEEYNSTYRVVSVLTVLHQDWLNGKEYKCKVSNKALPAPIEKTISKAKGQPREPQVYTLPPSREEMTKNQVSLTCDVSGFYPSDIAVEWESDGQPENNYKTTPPVLDSDGSFFLYSKLTVDKSRWEQGDVFSCSVLHEALHSHYTQKSLSLSPGK

SEQ ID NO: 2034 - protein, 213 aa, synthetic construct; identical to SEQ ID NO: 1983
  source 1..213: note = XENP44896 Chain 3 - CEA-A[CEACAM5]_L1

SEQ ID NO: 2035 - protein, 450 aa, synthetic construct; identical to SEQ ID NO: 1993
  source 1..450: note = XENP44897 Chain 1 - CEA-A[CEACAM5]_H1_IgG1_pI(-)_Isosteric_A_C220S/PVA_/S267K/L 368D/K370S/M428L/N434S

SEQ ID NO: 2036 - protein, 479 aa, synthetic construct
  source 1..479: note = XENP44897 Chain 2 - 1A7[CD28]_H1.1_L1.71_VH_G46C_VL_Q108C_scFv(G4A)4_Fc(216)_Ig G1_pI(-)_Isosteric_A_C220S/PVA_/S267K/L368D/K370S/M428L/N43 4S
EVQLLESGGGLVQPGGSLRLSCAASGFTFSSYYMSWVRQAPGKCLEWVSTISGSGDSTYYADSVKGRFTISRDNSKNTLYLQMNSLRAEDTAVYYCAKSGPGLRQVGFDYWGQGTLVTVSSGGGGAGGGGAGGGGAGGGGADIQMTQSPSSLSASVGDRVTITCRASQSISSYLNWYQQKPGKAPKLLIYAASSLQSGVPSRFSGSGSGTDFTLTISSLQPEDFATYYCQQVYSTPFTFGCGTKLEIKEPKSSDKTHTCPPCPAPPVAGPSVFLFPPKPKDTLMISRTPEVTCVVVDVKHEDPEVKFNWYVDGVEVHNAKTKPREEEYNSTYRVVSVLTVLHQDWLNGKEYKCKVSNKALPAPIEKTISKAKGQPREPQVYTLPPSREEMTKNQVSLTCDVSGFYPSDIAVEWESDGQPENNYKTTPPVLDSDGSFFLYSKLTVDKSRWEQGDVFSCSVLHEALHSHYTQKSLSLSPGK

SEQ ID NO: 2037 - protein, 213 aa, synthetic construct; identical to SEQ ID NO: 1983
  source 1..213: note = XENP44897 Chain 3 - CEA-A[CEACAM5]_L1

SEQ ID NO: 2038 - protein, 450 aa, synthetic construct; identical to SEQ ID NO: 1993
  source 1..450: note = XENP44898 Chain 1 - CEA-A[CEACAM5]_H1_IgG1_pI(-)_Isosteric_A_C220S/PVA_/S267K/L 368D/K370S/M428L/N434S

SEQ ID NO: 2039 - protein, 479 aa, synthetic construct
  source 1..479: note = XENP44898 Chain 2 - 1A7[CD28]_L1.71_H1.1_VH_G46C_VL_Q108C_scFv(G4A)4_Fc(216)_Ig G1_pI(-)_Isosteric_A_C220S/PVA_/S267K/L368D/K370S/M428L/N43 4S
DIQMTQSPSSLSASVGDRVTITCRASQSISSYLNWYQQKPGKAPKLLIYAASSLQSGVPSRFSGSGSGTDFTLTISSLQPEDFATYYCQQVYSTPFTFGCGTKLEIKGGGGAGGGGAGGGGAGGGGAEVQLLESGGGLVQPGGSLRLSCAASGFTFSSYYMSWVRQAPGKCLEWVSTISGSGDSTYYADSVKGRFTISRDNSKNTLYLQMNSLRAEDTAVYYCAKSGPGLRQVGFDYWGQGTLVTVSSEPKSSDKTHTCPPCPAPPVAGPSVFLFPPKPKDTLMISRTPEVTCVVVDVKHEDPEVKFNWYVDGVEVHNAKTKPREEEYNSTYRVVSVLTVLHQDWLNGKEYKCKVSNKALPAPIEKTISKAKGQPREPQVYTLPPSREEMTKNQVSLTCDVSGFYPSDIAVEWESDGQPENNYKTTPPVLDSDGSFFLYSKLTVDKSRWEQGDVFSCSVLHEALHSHYTQKSLSLSPGK

SEQ ID NO: 2040 - protein, 213 aa, synthetic construct; identical to SEQ ID NO: 1983
  source 1..213: note = XENP44898 Chain 3 - CEA-A[CEACAM5]_L1

SEQ ID NO: 2041 - protein, 450 aa, synthetic construct; identical to SEQ ID NO: 1981
  source 1..450: note = XENP44911 Chain 1 - CEA-A[CEACAM5]_H1_IgG1_pI(-)_Isosteric_A_PVA_/S267K/L368D/K 370S/M428L/N434S

SEQ ID NO: 2042 - protein, 479 aa, synthetic construct
  source 1..479: note = XENP44911 Chain 2 - 1A7[CD28]_H1.1_L1.71_VH_G46C_VL_Q108C_scFv(GKPGS)4_Fc(216)_ IgG1_C220S/PVA_/S267K/S364K/E357Q/M428L/N434S
EVQLLESGGGLVQPGGSLRLSCAASGFTFSSYYMSWVRQAPGKCLEWVSTISGSGDSTYYADSVKGRFTISRDNSKNTLYLQMNSLRAEDTAVYYCAKSGPGLRQVGFDYWGQGTLVTVSSGKPGSGKPGSGKPGSGKPGSDIQMTQSPSSLSASVGDRVTITCRASQSISSYLNWYQQKPGKAPKLLIYAASSLQSGVPSRFSGSGSGTDFTLTISSLQPEDFATYYCQQVYSTPFTFGCGTKLEIKEPKSSDKTHTCPPCPAPPVAGPSVFLFPPKPKDTLMISRTPEVTCVVVDVKHEDPEVKFNWYVDGVEVHNAKTKPREEQYNSTYRVVSVLTVLHQDWLNGKEYKCKVSNKALPAPIEKTISKAKGQPREPQVYTLPPSREQMTKNQVKLTCLVKGFYPSDIAVEWESNGQPENNYKTTPPVLDSDGSFFLYSKLTVDKSRWQQGNVFSCSVLHEALHSHYTQKSLSLSPGK

SEQ ID NO: 2043 - protein, 213 aa, synthetic construct; identical to SEQ ID NO: 1983
  source 1..213: note = XENP44911 Chain 3 - CEA-A[CEACAM5]_L1

SEQ ID NO: 2044 - protein, 450 aa, synthetic construct; identical to SEQ ID NO: 1981
  source 1..450: note = XENP44912 Chain 1 - CEA-A[CEACAM5]_H1_IgG1_pI(-)_Isosteric_A_PVA_/S267K/L368D/K 370S/M428L/N434S

SEQ ID NO: 2045 - protein, 479 aa, synthetic construct
  source 1..479: note = XENP44912 Chain 2 - 1A7[CD28]_L1.71_H1.1_VH_G46C_VL_Q108C_scFv(GKPGS)4_Fc(216)_ IgG1_C220S/PVA_/S267K/S364K/E357Q/M428L/N434S
DIQMTQSPSSLSASVGDRVTITCRASQSISSYLNWYQQKPGKAPKLLIYAASSLQSGVPSRFSGSGSGTDFTLTISSLQPEDFATYYCQQVYSTPFTFGCGTKLEIKGKPGSGKPGSGKPGSGKPGSEVQLLESGGGLVQPGGSLRLSCAASGFTFSSYYMSWVRQAPGKCLEWVSTISGSGDSTYYADSVKGRFTISRDNSKNTLYLQMNSLRAEDTAVYYCAKSGPGLRQVGFDYWGQGTLVTVSSEPKSSDKTHTCPPCPAPPVAGPSVFLFPPKPKDTLMISRTPEVTCVVVDVKHEDPEVKFNWYVDGVEVHNAKTKPREEQYNSTYRVVSVLTVLHQDWLNGKEYKCKVSNKALPAPIEKTISKAKGQPREPQVYTLPPSREQMTKNQVKLTCLVKGFYPSDIAVEWESNGQPENNYKTTPPVLDSDGSFFLYSKLTVDKSRWQQGNVFSCSVLHEALHSHYTQKSLSLSPGK

SEQ ID NO: 2046 - protein, 213 aa, synthetic construct; identical to SEQ ID NO: 1983
  source 1..213: note = XENP44912 Chain 3 - CEA-A[CEACAM5]_L1

SEQ ID NO: 2047 - protein, 450 aa, synthetic construct; identical to SEQ ID NO: 1981
  source 1..450: note = XENP44913 Chain 1 - CEA-A[CEACAM5]_H1_IgG1_pI(-)_Isosteric_A_PVA_/S267K/L368D/K 370S/M428L/N434S

SEQ ID NO: 2048 - protein, 479 aa, synthetic construct; identical to SEQ ID NO: 519
  source 1..479: note = XENP44913 Chain 2 - 1A7[CD28]_H1.14_L1.71_VH_G46C_VL_Q108C_scFv(GKPGS)4_Fc(216) _IgG1_C220S/PVA_/S267K/S364K/E357Q/M428L/N434S

SEQ ID NO: 2049 - protein, 213 aa, synthetic construct
  source 1..213: note = XENP44913 Chain 3 - CEA-A[CEACAM5]_L2.15
EIVLTQSPATLSLSPGERATLSCRASSSVTYIHWYQQKPGQAPKSLIYATSNLASGIPARFSGSGSGTDFTLTISSLEPEDFAVYYCQHWSSKPPTFGGGTKVEIKRTVAAPSVFIFPPSDEQLKSGTASVVCLLNNFYPREAKVQWKVDNALQSGNSQESVTEQDSKDSTYSLSSTLTLSKADYEKHKVYACEVTHQGLSSPVTKSFNRGEC

SEQ ID NO: 2050 - protein, 450 aa, synthetic construct
  source 1..450: note = XENP44914 Chain 1 - CEA-A[CEACAM5]_H1.7_IgG1_pI(-)_Isosteric_A_PVA_/S267K/L368D /K370S/M428L/N434S
EVQLVESGGGLVQPGGSLRLSCAASGFTFTDYYMNWVRQAPGKGLEWVGFIGNKANAYTTEYSASVKGRFTISRDKSKSSLYLQMNSLKTEDTAVYYCTRDRGLRFYFDYWGQGTLVTVSSASTKGPSVFPLAPSSKSTSGGTAALGCLVKDYFPEPVTVSWNSGALTSGVHTFPAVLQSSGLYSLSSVVTVPSSSLGTQTYICNVNHKPSDTKVDKKVEPKSCDKTHTCPPCPAPPVAGPSVFLFPPKPKDTLMISRTPEVTCVVVDVKHEDPEVKFNWYVDGVEVHNAKTKPREEEYNSTYRVVSVLTVLHQDWLNGKEYKCKVSNKALPAPIEKTISKAKGQPREPQVYTLPPSREEMTKNQVSLTCDVSGFYPSDIAVEWESDGQPENNYKTTPPVLDSDGSFFLYSKLTVDKSRWEQGDVFSCSVLHEALHSHYTQKSLSLSPGK

SEQ ID NO: 2051 - protein, 479 aa, synthetic construct; identical to SEQ ID NO: 519
  source 1..479: note = XENP44914 Chain 2 - 1A7[CD28]_H1.14_L1.71_VH_G46C_VL_Q108C_scFv(GKPGS)4_Fc(216) _IgG1_C220S/PVA_/S267K/S364K/E357Q/M428L/N434S

SEQ ID NO: 2052 - protein, 213 aa, synthetic construct; identical to SEQ ID NO: 1983
  source 1..213: note = XENP44914 Chain 3 - CEA-A[CEACAM5]_L1

SEQ ID NO: 2053 - protein, 450 aa, synthetic construct; identical to SEQ ID NO: 2050
  source 1..450: note = XENP44915 Chain 1 - CEA-A[CEACAM5]_H1.7_IgG1_pI(-)_Isosteric_A_PVA_/S267K/L368D /K370S/M428L/N434S

SEQ ID NO: 2054 - protein, 479 aa, synthetic construct; identical to SEQ ID NO: 519
  source 1..479: note = XENP44915 Chain 2 - 1A7[CD28]_H1.14_L1.71_VH_G46C_VL_Q108C_scFv(GKPGS)4_Fc(216) _IgG1_C220S/PVA_/S267K/S364K/E357Q/M428L/N434S

SEQ ID NO: 2055 - protein, 213 aa, synthetic construct; identical to SEQ ID NO: 2049
  source 1..213: note = XENP44915 Chain 3 - CEA-A[CEACAM5]_L2.15

SEQ ID NO: 2056 - protein, 449 aa, synthetic construct
  source 1..449: note = XENP45226 Chain 1 - CEA-C[CEACAM5]_H1.1_IgG1_pI(-)_Isosteric_A_PVA_/S267K/L368D /K370S/M428L/N434S
QVQLVQSGAEVKKPGASVKVSCKASGFNIKDSYMHWVRQAPGQGLEWMGWIDPENGDTEYAPKFQGRVTMTRDTSISTAYMELSRLRSDDTAVYYCNEGTPTGPYYFDYWGQGTLVTVSSASTKGPSVFPLAPSSKSTSGGTAALGCLVKDYFPEPVTVSWNSGALTSGVHTFPAVLQSSGLYSLSSVVTVPSSSLGTQTYICNVNHKPSDTKVDKKVEPKSCDKTHTCPPCPAPPVAGPSVFLFPPKPKDTLMISRTPEVTCVVVDVKHEDPEVKFNWYVDGVEVHNAKTKPREEEYNSTYRVVSVLTVLHQDWLNGKEYKCKVSNKALPAPIEKTISKAKGQPREPQVYTLPPSREEMTKNQVSLTCDVSGFYPSDIAVEWESDGQPENNYKTTPPVLDSDGSFFLYSKLTVDKSRWEQGDVFSCSVLHEALHSHYTQKSLSLSPGK

SEQ ID NO: 2057 - protein, 479 aa, synthetic construct; identical to SEQ ID NO: 519
  source 1..479: note = XENP45226 Chain 2 - 1A7[CD28]_H1.14_L1.71_VH_G46C_VL_Q108C_scFv(GKPGS)4_Fc(216) _IgG1_C220S/PVA_/S267K/S364K/E357Q/M428L/N434S

SEQ ID NO: 2058 - protein, 213 aa, synthetic construct
  source 1..213: note = XENP45226 Chain 3 - CEA-C[CEACAM5]_L1.1
EIVLTQSPATLSLSPGERATLSCRASSSVSYMHWFQQKPGQSPRLLIYSTSNLASGVPARFSGSGSGTDYTLTISSLEPEDFAVYYCQQRSSYPLTFGAGTKVEIKRTVAAPSVFIFPPSDEQLKSGTASVVCLLNNFYPREAKVQWKVDNALQSGNSQESVTEQDSKDSTYSLSSTLTLSKADYEKHKVYACEVTHQGLSSPVTKSFNRGEC

SEQ ID NO: 2059 - protein, 449 aa, synthetic construct
  source 1..449: note = XENP45227 Chain 1 - CEA-C[CEACAM5]_H1.2_IgG1_pI(-)_Isosteric_A_PVA_/S267K/L368D /K370S/M428L/N434S
QVQLVQSGAEVKKPGASVKVSCKASGFNIKDSYMHWVRQAPGQGLEWMGWIDPEQGDTEYAPKFQGRVTMTRDTSISTAYMELSRLRSDDTAVYYCNEGTPTGPYYFDYWGQGTLVTVSSASTKGPSVFPLAPSSKSTSGGTAALGCLVKDYFPEPVTVSWNSGALTSGVHTFPAVLQSSGLYSLSSVVTVPSSSLGTQTYICNVNHKPSDTKVDKKVEPKSCDKTHTCPPCPAPPVAGPSVFLFPPKPKDTLMISRTPEVTCVVVDVKHEDPEVKFNWYVDGVEVHNAKTKPREEEYNSTYRVVSVLTVLHQDWLNGKEYKCKVSNKALPAPIEKTISKAKGQPREPQVYTLPPSREEMTKNQVSLTCDVSGFYPSDIAVEWESDGQPENNYKTTPPVLDSDGSFFLYSKLTVDKSRWEQGDVFSCSVLHEALHSHYTQKSLSLSPGK

SEQ ID NO: 2060 - protein, 479 aa, synthetic construct; identical to SEQ ID NO: 519
  source 1..479: note = XENP45227 Chain 2 - 1A7[CD28]_H1.14_L1.71_VH_G46C_VL_Q108C_scFv(GKPGS)4_Fc(216) _IgG1_C220S/PVA_/S267K/S364K/E357Q/M428L/N434S

SEQ ID NO: 2061 - protein, 213 aa, synthetic construct; identical to SEQ ID NO: 2058
  source 1..213: note = XENP45227 Chain 3 - CEA-C[CEACAM5]_L1.1

SEQ ID NO: 2062 - protein, 450 aa, synthetic construct
  source 1..450: note = XENP45229 Chain 1 - CEA-A[CEACAM5]_H1.7_IgG1_pI(-)_Isosteric_A_C220S/PVA_/S267K /L368D/K370S/M428L/N434S
EVQLVESGGGLVQPGGSLRLSCAASGFTFTDYYMNWVRQAPGKGLEWVGFIGNKANAYTTEYSASVKGRFTISRDKSKSSLYLQMNSLKTEDTAVYYCTRDRGLRFYFDYWGQGTLVTVSSASTKGPSVFPLAPSSKSTSGGTAALGCLVKDYFPEPVTVSWNSGALTSGVHTFPAVLQSSGLYSLSSVVTVPSSSLGTQTYICNVNHKPSNTKVDKKVEPKSCDKTHTCPPCPAPPVAGPSVFLFPPKPKDTLMISRTPEVTCVVVDVKHEDPEVKFNWYVDGVEVHNAKTKPREEQYNSTYRVVSVLTVLHQDWLNGKEYKCKVSNKALPAPIEKTISKAKGQPREPQVYTLPPSREQMTKNQVKLTCLVKGFYPSDIAVEWESNGQPENNYKTTPPVLDSDGSFFLYSKLTVDKSRWQQGNVFSCSVLHEALHSHYTQKSLSLSPGK

SEQ ID NO: 2063 - protein, 479 aa, synthetic construct; identical to SEQ ID NO: 2027
  source 1..479: note = XENP45229 Chain 2 - 1A7[CD28]_H1_L1.71_scFv(G4A)4_Fc(216)_IgG1_pI(-)_Isosteric_ A_C220S/PVA_/S267K/L368D/K370S/M428L/N434S

SEQ ID NO: 2064 - protein, 213 aa, synthetic construct; identical to SEQ ID NO: 2049
  source 1..213: note = XENP45229 Chain 3 - CEA-A[CEACAM5]_L2.15

SEQ ID NO: 2065 - protein, 450 aa, synthetic construct; identical to SEQ ID NO: 2062
  source 1..450: note = XENP45230 Chain 1 - CEA-A[CEACAM5]_H1.7_IgG1_pI(-)_Isosteric_A_C220S/PVA_/S267K /L368D/K370S/M428L/N434S

SEQ ID NO: 2066 - protein, 479 aa, synthetic construct; identical to SEQ ID NO: 2030
  source 1..479: note = XENP45230 Chain 2 - 1A7[CD28]_H1.14_L1.71_VH_G46C_VL_Q108C_scFv(G4A)4_Fc(216)_I gG1_pI(-)_Isosteric_A_C220S/PVA_/S267K/L368D/K370S/M428L/N4 34S

SEQ ID NO: 2067 - protein, 213 aa, synthetic construct; identical to SEQ ID NO: 2049
  source 1..213: note = XENP45230 Chain 3 - CEA-A[CEACAM5]_L2.15

SEQ ID NO: 2068 - protein, 450 aa, synthetic construct; identical to SEQ ID NO: 2062
  source 1..450: note = XENP45231 Chain 1 - CEA-A[CEACAM5]_H1.7_IgG1_pI(-)_Isosteric_A_C220S/PVA_/S267K /L368D/K370S/M428L/N434S

SEQ ID NO: 2069 - protein, 479 aa, synthetic construct; identical to SEQ ID NO: 2033
  source 1..479: note = XENP45231 Chain 2 - 1A7[CD28]_L1.71_H1.14_VH_G46C_VL_Q108C_scFv(G4A)4_Fc(216)_I gG1_pI(-)_Isosteric_A_C220S/PVA_/S267K/L368D/K370S/M428L/N4 34S

SEQ ID NO: 2070 - protein, 213 aa, synthetic construct; identical to SEQ ID NO: 2049
  source 1..213: note = XENP45231 Chain 3 - CEA-A[CEACAM5]_L2.15

SEQ ID NO: 2071 - protein, 450 aa, synthetic construct; identical to SEQ ID NO: 2062
  source 1..450: note = XENP45232 Chain 1 - CEA-A[CEACAM5]_H1.7_IgG1_pI(-)_Isosteric_A_C220S/PVA_/S267K /L368D/K370S/M428L/N434S

SEQ ID NO: 2072 - protein, 479 aa, synthetic construct; identical to SEQ ID NO: 2036
  source 1..479: note = XENP45232 Chain 2 - 1A7[CD28]_H1.1_L1.71_VH_G46C_VL_Q108C_scFv(G4A)4_Fc(216)_Ig G1_pI(-)_Isosteric_A_C220S/PVA_/S267K/L368D/K370S/M428L/N43 4S

SEQ ID NO: 2073 - protein, 213 aa, synthetic construct; identical to SEQ ID NO: 2049
  source 1..213: note = XENP45232 Chain 3 - CEA-A[CEACAM5]_L2.15

SEQ ID NO: 2074 - protein, 450 aa, synthetic construct; identical to SEQ ID NO: 2062
  source 1..450: note = XENP45233 Chain 1 - CEA-A[CEACAM5]_H1.7_IgG1_pI(-)_Isosteric_A_C220S/PVA_/S267K /L368D/K370S/M428L/N434S

SEQ ID NO: 2075 - protein, 479 aa, synthetic construct; identical to SEQ ID NO: 2039
  source 1..479: note = XENP45233 Chain 2 - 1A7[CD28]_L1.71_H1.1_VH_G46C_VL_Q108C_scFv(G4A)4_Fc(216)_Ig G1_pI(-)_Isosteric_A_C220S/PVA_/S267K/L368D/K370S/M428L/N43 4S

SEQ ID NO: 2076 - protein, 213 aa, synthetic construct; identical to SEQ ID NO: 2049
  source 1..213: note = XENP45233 Chain 3 - CEA-A[CEACAM5]_L2.15

SEQ ID NO: 2077 - protein, 450 aa, synthetic construct; identical to SEQ ID NO: 2050
  source 1..450: note = XENP45558 Chain 1 - CEA-A[CEACAM5]_H1.7_IgG1_pI(-)_Isosteric_A_PVA_/S267K/L368D /K370S/M428L/N434S

SEQ ID NO: 2078 - protein, 479 aa, synthetic construct; identical to SEQ ID NO: 714
  source 1..479: note = XENP45558 Chain 2 - 1A7[CD28]_H1.14_L1.71_scFv(GKPGS)4_Fc(216)_IgG1_C220S/PVA_/ S267K/S364K/E357Q/M428L/N434S

SEQ ID NO: 2079 - protein, 213 aa, synthetic construct; identical to SEQ ID NO: 2049
  source 1..213: note = XENP45558 Chain 3 - CEA-A[CEACAM5]_L2.15

SEQ ID NO: 2080 - protein, 450 aa, synthetic construct; identical to SEQ ID NO: 2050
  source 1..450: note = XENP45559 Chain 1 - CEA-A[CEACAM5]_H1.7_IgG1_pI(-)_Isosteric_A_PVA_/S267K/L368D /K370S/M428L/N434S

SEQ ID NO: 2081 - protein, 479 aa, synthetic construct
  source 1..479: note = XENP45559 Chain 2 - 1A7[CD28]_H1.129_L1.71_scFv(GKPGS)4_Fc(216)_IgG1_C220S/PVA_ /S267K/S364K/E357Q
EVQLLESGGGLVQPGGSLRLSCAASGFTFSSYYMSWVRQAPGKGLEWVSTISERADSTYYADSVKGRFTISRDNSKNTLYLQMNSLRAEDTAVYYCAKSGPGLRQVGFDYWGQGTLVTVSSGKPGSGKPGSGKPGSGKPGSDIQMTQSPSSLSASVGDRVTITCRASQSISSYLNWYQQKPGKAPKLLIYAASSLQSGVPSRFSGSGSGTDFTLTISSLQPEDFATYYCQQVYSTPFTFGQGTKLEIKEPKSSDKTHTCPPCPAPPVAGPSVFLFPPKPKDTLMISRTPEVTCVVVDVKHEDPEVKFNWYVDGVEVHNAKTKPREEQYNSTYRVVSVLTVLHQDWLNGKEYKCKVSNKALPAPIEKTISKAKGQPREPQVYTLPPSREQMTKNQVKLTCLVKGFYPSDIAVEWESNGQPENNYKTTPPVLDSDGSFFLYSKLTVDKSRWQQGNVFSCSVMHEALHNHYTQKSLSLSPGK

SEQ ID NO: 2082 - protein, 213 aa, synthetic construct; identical to SEQ ID NO: 2049
  source 1..213: note = XENP45559 Chain 3 - CEA-A[CEACAM5]_L2.15

SEQ ID NO: 2083 - protein, 450 aa, synthetic construct; identical to SEQ ID NO: 2050
  source 1..450: note = XENP45560 Chain 1 - CEA-A[CEACAM5]_H1.7_IgG1_pI(-)_Isosteric_A_PVA_/S267K/L368D /K370S/M428L/N434S

SEQ ID NO: 2084 - protein, 479 aa, synthetic construct; identical to SEQ ID NO: 492
  source 1..479: note = XENP45560 Chain 2 - 1A7[CD28]_H1.129_L1.71_VH_G46C_VL_Q108C_scFv(GKPGS)4_Fc(216 )_IgG1_C220S/PVA_/S267K/S364K/E357Q

SEQ ID NO: 2085 - protein, 213 aa, synthetic construct; identical to SEQ ID NO: 2049
  source 1..213: note = XENP45560 Chain 3 - CEA-A[CEACAM5]_L2.15

SEQ ID NO: 2086 - protein, 450 aa, synthetic construct; identical to SEQ ID NO: 2050
  source 1..450: note = XENP45561 Chain 1 - CEA-A[CEACAM5]_H1.7_IgG1_pI(-)_Isosteric_A_PVA_/S267K/L368D /K370S/M428L/N434S

SEQ ID NO: 2087 - protein, 479 aa, synthetic construct
  source 1..479: note = XENP45561 Chain 2 - 1A7[CD28]_H1.106_L1.71_VH_G46C_VL_Q108C_scFv(GKPGS)4_Fc(216 )_IgG1_C220S/PVA_/S267K/S364K/E357Q
EVQLLESGGGLVQPGGSLRLSCAASGFTFSSYYMSWVRQAPGKCLEWVSTISERGDSTYYADSVKGRFTISRDNSKNTLYLQMNSLRAEDTAVYYCAKSGPGLRQVGFDYWGQGTLVTVSSGKPGSGKPGSGKPGSGKPGSDIQMTQSPSSLSASVGDRVTITCRASQSISSYLNWYQQKPGKAPKLLIYAASSLQSGVPSRFSGSGSGTDFTLTISSLQPEDFATYYCQQVYSTPFTFGCGTKLEIKEPKSSDKTHTCPPCPAPPVAGPSVFLFPPKPKDTLMISRTPEVTCVVVDVKHEDPEVKFNWYVDGVEVHNAKTKPREEQYNSTYRVVSVLTVLHQDWLNGKEYKCKVSNKALPAPIEKTISKAKGQPREPQVYTLPPSREQMTKNQVKLTCLVKGFYPSDIAVEWESNGQPENNYKTTPPVLDSDGSFFLYSKLTVDKSRWQQGNVFSCSVMHEALHNHYTQKSLSLSPGK

SEQ ID NO: 2088 - protein, 213 aa, synthetic construct; identical to SEQ ID NO: 2049
  source 1..213: note = XENP45561 Chain 3 - CEA-A[CEACAM5]_L2.15

SEQ ID NO: 2089 - protein, 450 aa, synthetic construct
  source 1..450: note = XENP45904 Chain 1 - CEA-A[CEACAM5]_H1.10_IgG1_pI(-)_Isosteric_A_PVA_/S267K/L368 D/K370S/M428L/N434S
EVQLVESGGGLVQPGGSLRLSCAASGFTFIDYYMNWVRQAPGKGLEWVGFIGNKANAYTTEYSASVKGRFTISRDKSKSSLYLQMNSLKTEDTAVYYCTRDRGLRFYFDYWGQGTLVTVSSASTKGPSVFPLAPSSKSTSGGTAALGCLVKDYFPEPVTVSWNSGALTSGVHTFPAVLQSSGLYSLSSVVTVPSSSLGTQTYICNVNHKPSDTKVDKKVEPKSCDKTHTCPPCPAPPVAGPSVFLFPPKPKDTLMISRTPEVTCVVVDVKHEDPEVKFNWYVDGVEVHNAKTKPREEEYNSTYRVVSVLTVLHQDWLNGKEYKCKVSNKALPAPIEKTISKAKGQPREPQVYTLPPSREEMTKNQVSLTCDVSGFYPSDIAVEWESDGQPENNYKTTPPVLDSDGSFFLYSKLTVDKSRWEQGDVFSCSVLHEALHSHYTQKSLSLSPGK

SEQ ID NO: 2090 - protein, 479 aa, synthetic construct; identical to SEQ ID NO: 519
  source 1..479: note = XENP45904 Chain 2 - 1A7[CD28]_H1.14_L1.71_VH_G46C_VL_Q108C_scFv(GKPGS)4_Fc(216) _IgG1_C220S/PVA_/S267K/S364K/E357Q/M428L/N434S

SEQ ID NO: 2091 - protein, 213 aa, synthetic construct; identical to SEQ ID NO: 2049
  source 1..213: note = XENP45904 Chain 3 - CEA-A[CEACAM5]_L2.15

SEQ ID NO: 2092 - protein, 450 aa, synthetic construct
  source 1..450: note = XENP45905 Chain 1 - CEA-A[CEACAM5]_H1.12_IgG1_pI(-)_Isosteric_A_PVA_/S267K/L368 D/K370S/M428L/N434S
EVQLVESGGGLVQPGGSLRLSCAASGFTFQDYYMNWVRQAPGKGLEWVGFIGNKANAYTTEYSASVKGRFTISRDKSKSSLYLQMNSLKTEDTAVYYCTRDRGLRFYFDYWGQGTLVTVSSASTKGPSVFPLAPSSKSTSGGTAALGCLVKDYFPEPVTVSWNSGALTSGVHTFPAVLQSSGLYSLSSVVTVPSSSLGTQTYICNVNHKPSDTKVDKKVEPKSCDKTHTCPPCPAPPVAGPSVFLFPPKPKDTLMISRTPEVTCVVVDVKHEDPEVKFNWYVDGVEVHNAKTKPREEEYNSTYRVVSVLTVLHQDWLNGKEYKCKVSNKALPAPIEKTISKAKGQPREPQVYTLPPSREEMTKNQVSLTCDVSGFYPSDIAVEWESDGQPENNYKTTPPVLDSDGSFFLYSKLTVDKSRWEQGDVFSCSVLHEALHSHYTQKSLSLSPGK

SEQ ID NO: 2093 - protein, 479 aa, synthetic construct; identical to SEQ ID NO: 519
  source 1..479: note = XENP45905 Chain 2 - 1A7[CD28]_H1.14_L1.71_VH_G46C_VL_Q108C_scFv(GKPGS)4_Fc(216) _IgG1_C220S/PVA_/S267K/S364K/E357Q/M428L/N434S

SEQ ID NO: 2094 - protein, 213 aa, synthetic construct; identical to SEQ ID NO: 2049
  source 1..213: note = XENP45905 Chain 3 - CEA-A[CEACAM5]_L2.15

SEQ ID NO: 2095 - protein, 450 aa, synthetic construct
  source 1..450: note = XENP45906 Chain 1 - CEA-A[CEACAM5]_H1.13_IgG1_pI(-)_Isosteric_A_PVA_/S267K/L368 D/K370S/M428L/N434S
EVQLVESGGGLVQPGGSLRLSCAASGFTFSDYYMNWVRQAPGKGLEWVGFIGNKANAYTTEYSASVKGRFTISRDKSKSSLYLQMNSLKTEDTAVYYCTRDRGLRFYFDYWGQGTLVTVSSASTKGPSVFPLAPSSKSTSGGTAALGCLVKDYFPEPVTVSWNSGALTSGVHTFPAVLQSSGLYSLSSVVTVPSSSLGTQTYICNVNHKPSDTKVDKKVEPKSCDKTHTCPPCPAPPVAGPSVFLFPPKPKDTLMISRTPEVTCVVVDVKHEDPEVKFNWYVDGVEVHNAKTKPREEEYNSTYRVVSVLTVLHQDWLNGKEYKCKVSNKALPAPIEKTISKAKGQPREPQVYTLPPSREEMTKNQVSLTCDVSGFYPSDIAVEWESDGQPENNYKTTPPVLDSDGSFFLYSKLTVDKSRWEQGDVFSCSVLHEALHSHYTQKSLSLSPGK

SEQ ID NO: 2096 - protein, 479 aa, synthetic construct; identical to SEQ ID NO: 519
  source 1..479: note = XENP45906 Chain 2 - 1A7[CD28]_H1.14_L1.71_VH_G46C_VL_Q108C_scFv(GKPGS)4_Fc(216) _IgG1_C220S/PVA_/S267K/S364K/E357Q/M428L/N434S

SEQ ID NO: 2097 - protein, 213 aa, synthetic construct; identical to SEQ ID NO: 2049
  source 1..213: note = XENP45906 Chain 3 - CEA-A[CEACAM5]_L2.15

SEQ ID NO: 2098 - protein, 450 aa, synthetic construct
  source 1..450: note = XENP45907 Chain 1 - CEA-A[CEACAM5]_H1.17_IgG1_pI(-)_Isosteric_A_PVA_/S267K/L368 D/K370S/M428L/N434S
EVQLVESGGGLVQPGGSLRLSCAASGFTFTHYYMNWVRQAPGKGLEWVGFIGNKANAYTTEYSASVKGRFTISRDKSKSSLYLQMNSLKTEDTAVYYCTRDRGLRFYFDYWGQGTLVTVSSASTKGPSVFPLAPSSKSTSGGTAALGCLVKDYFPEPVTVSWNSGALTSGVHTFPAVLQSSGLYSLSSVVTVPSSSLGTQTYICNVNHKPSDTKVDKKVEPKSCDKTHTCPPCPAPPVAGPSVFLFPPKPKDTLMISRTPEVTCVVVDVKHEDPEVKFNWYVDGVEVHNAKTKPREEEYNSTYRVVSVLTVLHQDWLNGKEYKCKVSNKALPAPIEKTISKAKGQPREPQVYTLPPSREEMTKNQVSLTCDVSGFYPSDIAVEWESDGQPENNYKTTPPVLDSDGSFFLYSKLTVDKSRWEQGDVFSCSVLHEALHSHYTQKSLSLSPGK

SEQ ID NO: 2099 - protein, 479 aa, synthetic construct; identical to SEQ ID NO: 519
  source 1..479: note = XENP45907 Chain 2 - 1A7[CD28]_H1.14_L1.71_VH_G46C_VL_Q108C_scFv(GKPGS)4_Fc(216) _IgG1_C220S/PVA_/S267K/S364K/E357Q/M428L/N434S

SEQ ID NO: 2100 - protein, 213 aa, synthetic construct; identical to SEQ ID NO: 2049
  source 1..213: note = XENP45907 Chain 3 - CEA-A[CEACAM5]_L2.15

SEQ ID NO: 2101 - protein, 450 aa, synthetic construct
  source 1..450: note = XENP45908 Chain 1 - CEA-A[CEACAM5]_H1.49_IgG1_pI(-)_Isosteric_A_PVA_/S267K/L368 D/K370S/M428L/N434S
EVQLVESGGGLVQPGGSLRLSCAASGFTFTDYYMNWVRQAPGKGLEWVGFISNKANAYTTEYSASVKGRFTISRDKSKSSLYLQMNSLKTEDTAVYYCTRDRGLRFYFDYWGQGTLVTVSSASTKGPSVFPLAPSSKSTSGGTAALGCLVKDYFPEPVTVSWNSGALTSGVHTFPAVLQSSGLYSLSSVVTVPSSSLGTQTYICNVNHKPSDTKVDKKVEPKSCDKTHTCPPCPAPPVAGPSVFLFPPKPKDTLMISRTPEVTCVVVDVKHEDPEVKFNWYVDGVEVHNAKTKPREEEYNSTYRVVSVLTVLHQDWLNGKEYKCKVSNKALPAPIEKTISKAKGQPREPQVYTLPPSREEMTKNQVSLTCDVSGFYPSDIAVEWESDGQPENNYKTTPPVLDSDGSFFLYSKLTVDKSRWEQGDVFSCSVLHEALHSHYTQKSLSLSPGK

SEQ ID NO: 2102 - protein, 479 aa, synthetic construct; identical to SEQ ID NO: 519
  source 1..479: note = XENP45908 Chain 2 - 1A7[CD28]_H1.14_L1.71_VH_G46C_VL_Q108C_scFv(GKPGS)4_Fc(216) _IgG1_C220S/PVA_/S267K/S364K/E357Q/M428L/N434S

SEQ ID NO: 2103 - protein, 213 aa, synthetic construct; identical to SEQ ID NO: 2049
  source 1..213: note = XENP45908 Chain 3 - CEA-A[CEACAM5]_L2.15

SEQ ID NO: 2104 - protein, 450 aa, synthetic construct
  source 1..450: note = XENP45909 Chain 1 - CEA-A[CEACAM5]_H1.79_IgG1_pI(-)_Isosteric_A_PVA_/S267K/L368 D/K370S/M428L/N434S
EVQLVESGGGLVQPGGSLRLSCAASGFTFTDYYMNWVRQAPGKGLEWVGFIGNKANQYTTEYSASVKGRFTISRDKSKSSLYLQMNSLKTEDTAVYYCTRDRGLRFYFDYWGQGTLVTVSSASTKGPSVFPLAPSSKSTSGGTAALGCLVKDYFPEPVTVSWNSGALTSGVHTFPAVLQSSGLYSLSSVVTVPSSSLGTQTYICNVNHKPSDTKVDKKVEPKSCDKTHTCPPCPAPPVAGPSVFLFPPKPKDTLMISRTPEVTCVVVDVKHEDPEVKFNWYVDGVEVHNAKTKPREEEYNSTYRVVSVLTVLHQDWLNGKEYKCKVSNKALPAPIEKTISKAKGQPREPQVYTLPPSREEMTKNQVSLTCDVSGFYPSDIAVEWESDGQPENNYKTTPPVLDSDGSFFLYSKLTVDKSRWEQGDVFSCSVLHEALHSHYTQKSLSLSPGK

SEQ ID NO: 2105 - protein, 479 aa, synthetic construct; identical to SEQ ID NO: 519
  source 1..479: note = XENP45909 Chain 2 - 1A7[CD28]_H1.14_L1.71_VH_G46C_VL_Q108C_scFv(GKPGS)4_Fc(216) _IgG1_C220S/PVA_/S267K/S364K/E357Q/M428L/N434S

SEQ ID NO: 2106 - protein, 213 aa, synthetic construct; identical to SEQ ID NO: 2049
  source 1..213: note = XENP45909 Chain 3 - CEA-A[CEACAM5]_L2.15

SEQ ID NO: 2107 - protein, 450 aa, synthetic construct
  source 1..450: note = XENP45910 Chain 1 - CEA-A[CEACAM5]_H1.150_IgG1_pI(-)_Isosteric_A_PVA_/S267K/L36 8D/K370S/M428L/N434S
EVQLVESGGGLVQPGGSLRLSCAASGFTFTDYYMNWVRQAPGKGLEWVGFIGNKANAYTTEYSASVKGRFTISRDKSKSSLYLQMNSLKTEDTAVYYCTRDRGLRFVFDYWGQGTLVTVSSASTKGPSVFPLAPSSKSTSGGTAALGCLVKDYFPEPVTVSWNSGALTSGVHTFPAVLQSSGLYSLSSVVTVPSSSLGTQTYICNVNHKPSDTKVDKKVEPKSCDKTHTCPPCPAPPVAGPSVFLFPPKPKDTLMISRTPEVTCVVVDVKHEDPEVKFNWYVDGVEVHNAKTKPREEEYNSTYRVVSVLTVLHQDWLNGKEYKCKVSNKALPAPIEKTISKAKGQPREPQVYTLPPSREEMTKNQVSLTCDVSGFYPSDIAVEWESDGQPENNYKTTPPVLDSDGSFFLYSKLTVDKSRWEQGDVFSCSVLHEALHSHYTQKSLSLSPGK

SEQ ID NO: 2108 - protein, 479 aa, synthetic construct; identical to SEQ ID NO: 519
  source 1..479: note = XENP45910 Chain 2 - 1A7[CD28]_H1.14_L1.71_VH_G46C_VL_Q108C_scFv(GKPGS)4_Fc(216) _IgG1_C220S/PVA_/S267K/S364K/E357Q/M428L/N434S

SEQ ID NO: 2109 - protein, 213 aa, synthetic construct; identical to SEQ ID NO: 2049
  source 1..213: note = XENP45910 Chain 3 - CEA-A[CEACAM5]_L2.15

SEQ ID NO: 2110 - protein, 450 aa, synthetic construct; identical to SEQ ID NO: 2050
  source 1..450: note = XENP45911 Chain 1 - CEA-A[CEACAM5]_H1.7_IgG1_pI(-)_Isosteric_A_PVA_/S267K/L368D /K370S/M428L/N434S

SEQ ID NO: 2111 - protein, 479 aa, synthetic construct; identical to SEQ ID NO: 519
  source 1..479: note = XENP45911 Chain 2 - 1A7[CD28]_H1.14_L1.71_VH_G46C_VL_Q108C_scFv(GKPGS)4_Fc(216) _IgG1_C220S/PVA_/S267K/S364K/E357Q/M428L/N434S

SEQ ID NO: 2112 - protein, 213 aa, synthetic construct
  source 1..213: note = XENP45911 Chain 3 - CEA-A[CEACAM5]_L2.20
EIVLTQSPATLSLSPGERATLSCRASQSVTYIHWYQQKPGQAPKSLIYATSNLASGIPARFSGSGSGTDFTLTISSLEPEDFAVYYCQHWSSKPPTFGGGTKVEIKRTVAAPSVFIFPPSDEQLKSGTASVVCLLNNFYPREAKVQWKVDNALQSGNSQESVTEQDSKDSTYSLSSTLTLSKADYEKHKVYACEVTHQGLSSPVTKSFNRGEC

SEQ ID NO: 2113 - protein, 450 aa, synthetic construct; identical to SEQ ID NO: 2050
  source 1..450: note = XENP45912 Chain 1 - CEA-A[CEACAM5]_H1.7_IgG1_pI(-)_Isosteric_A_PVA_/S267K/L368D /K370S/M428L/N434S

SEQ ID NO: 2114 - protein, 479 aa, synthetic construct; identical to SEQ ID NO: 519
  source 1..479: note = XENP45912 Chain 2 - 1A7[CD28]_H1.14_L1.71_VH_G46C_VL_Q108C_scFv(GKPGS)4_Fc(216) _IgG1_C220S/PVA_/S267K/S364K/E357Q/M428L/N434S

SEQ ID NO: 2115 - protein, 213 aa, synthetic construct
  source 1..213: note = XENP45912 Chain 3 - CEA-A[CEACAM5]_L2.67
EIVLTQSPATLSLSPGERATLSCRASSSVTYIHWYQQKPGQAPKSLIYATSRLASGIPARFSGSGSGTDFTLTISSLEPEDFAVYYCQHWSSKPPTFGGGTKVEIKRTVAAPSVFIFPPSDEQLKSGTASVVCLLNNFYPREAKVQWKVDNALQSGNSQESVTEQDSKDSTYSLSSTLTLSKADYEKHKVYACEVTHQGLSSPVTKSFNRGEC

SEQ ID NO: 2116 - protein, 450 aa, synthetic construct; identical to SEQ ID NO: 2050
  source 1..450: note = XENP45913 Chain 1 - CEA-A[CEACAM5]_H1.7_IgG1_pI(-)_Isosteric_A_PVA_/S267K/L368D /K370S/M428L/N434S

SEQ ID NO: 2117 - protein, 479 aa, synthetic construct; identical to SEQ ID NO: 519
  source 1..479: note = XENP45913 Chain 2 - 1A7[CD28]_H1.14_L1.71_VH_G46C_VL_Q108C_scFv(GKPGS)4_Fc(216) _IgG1_C220S/PVA_/S267K/S364K/E357Q/M428L/N434S

SEQ ID NO: 2118 - protein, 213 aa, synthetic construct
  source 1..213: note = XENP45913 Chain 3 - CEA-A[CEACAM5]_L2.81
EIVLTQSPATLSLSPGERATLSCRASSSVTYIHWYQQKPGQAPKSLIYATSNLAQGIPARFSGSGSGTDFTLTISSLEPEDFAVYYCQHWSSKPPTFGGGTKVEIKRTVAAPSVFIFPPSDEQLKSGTASVVCLLNNFYPREAKVQWKVDNALQSGNSQESVTEQDSKDSTYSLSSTLTLSKADYEKHKVYACEVTHQGLSSPVTKSFNRGEC

SEQ ID NO: 2119 - protein, 450 aa, synthetic construct; identical to SEQ ID NO: 2050
  source 1..450: note = XENP45914 Chain 1 - CEA-A[CEACAM5]_H1.7_IgG1_pI(-)_Isosteric_A_PVA_/S267K/L368D /K370S/M428L/N434S

SEQ ID NO: 2120 - protein, 479 aa, synthetic construct; identical to SEQ ID NO: 519
  source 1..479: note = XENP45914 Chain 2 - 1A7[CD28]_H1.14_L1.71_VH_G46C_VL_Q108C_scFv(GKPGS)4_Fc(216) _IgG1_C220S/PVA_/S267K/S364K/E357Q/M428L/N434S

SEQ ID NO: 2121 - protein, 213 aa, synthetic construct
  source 1..213: note = XENP45914 Chain 3 - CEA-A[CEACAM5]_L2.102
EIVLTQSPATLSLSPGERATLSCRASSSVTYIHWYQQKPGQAPKSLIYATSNLASGIPARFSGSGSGTDFTLTISSLEPEDFAVYYCQHWSSQPPTFGGGTKVEIKRTVAAPSVFIFPPSDEQLKSGTASVVCLLNNFYPREAKVQWKVDNALQSGNSQESVTEQDSKDSTYSLSSTLTLSKADYEKHKVYACEVTHQGLSSPVTKSFNRGEC

SEQ ID NO: 2122 - protein, 450 aa, synthetic construct; identical to SEQ ID NO: 2050
  source 1..450: note = XENP45915 Chain 1 - CEA-A[CEACAM5]_H1.7_IgG1_pI(-)_Isosteric_A_PVA_/S267K/L368D /K370S/M428L/N434S

SEQ ID NO: 2123 - protein, 479 aa, synthetic construct; identical to SEQ ID NO: 495
  source 1..479: note = XENP45915 Chain 2 - 1A7[CD28]_H1.129_L1_VH_G46C_VL_Q108C_scFv(GKPGS)4_Fc(216)_I gG1_C220S/PVA_/S267K/S364K/E357Q

SEQ ID NO: 2124 - protein, 213 aa, synthetic construct; identical to SEQ ID NO: 2049
  source 1..213: note = XENP45915 Chain 3 - CEA-A[CEACAM5]_L2.15

SEQ ID NO: 2125 - protein, 450 aa, synthetic construct; identical to SEQ ID NO: 2050
  source 1..450: note = XENP45916 Chain 1 - CEA-A[CEACAM5]_H1.7_IgG1_pI(-)_Isosteric_A_PVA_/S267K/L368D /K370S/M428L/N434S

SEQ ID NO: 2126 - protein, 479 aa, synthetic construct
  source 1..479: note = XENP45916 Chain 2 - 1A7[CD28]_H1.106_L1_VH_G46C_VL_Q108C_scFv(GKPGS)4_Fc(216)_I gG1_C220S/PVA_/S267K/S364K/E357Q
EVQLLESGGGLVQPGGSLRLSCAASGFTFSSYYMSWVRQAPGKCLEWVSTISERGDSTYYADSVKGRFTISRDNSKNTLYLQMNSLRAEDTAVYYCAKSGPGLRQVGFDYWGQGTLVTVSSGKPGSGKPGSGKPGSGKPGSDIQMTQSPSSLSASVGDRVTITCRASQSISSYLNWYQQKPGKAPKLLIYAASSLQSGVPSRFSGSGSGTDFTLTISSLQPEDFATYYCQQSYSTPFTFGCGTKLEIKEPKSSDKTHTCPPCPAPPVAGPSVFLFPPKPKDTLMISRTPEVTCVVVDVKHEDPEVKFNWYVDGVEVHNAKTKPREEQYNSTYRVVSVLTVLHQDWLNGKEYKCKVSNKALPAPIEKTISKAKGQPREPQVYTLPPSREQMTKNQVKLTCLVKGFYPSDIAVEWESNGQPENNYKTTPPVLDSDGSFFLYSKLTVDKSRWQQGNVFSCSVMHEALHNHYTQKSLSLSPGK

SEQ ID NO: 2127 - protein, 213 aa, synthetic construct; identical to SEQ ID NO: 2049
  source 1..213: note = XENP45916 Chain 3 - CEA-A[CEACAM5]_L2.15

SEQ ID NO: 2128 - protein, 450 aa, synthetic construct; identical to SEQ ID NO: 2098
  source 1..450: note = XENP45930 Chain 1 - CEA-A[CEACAM5]_H1.17_IgG1_pI(-)_Isosteric_A_PVA_/S267K/L368 D/K370S/M428L/N434S

SEQ ID NO: 2129 - protein, 479 aa, synthetic construct; identical to SEQ ID NO: 519
  source 1..479: note = XENP45930 Chain 2 - 1A7[CD28]_H1.14_L1.71_VH_G46C_VL_Q108C_scFv(GKPGS)4_Fc(216) _IgG1_C220S/PVA_/S267K/S364K/E357Q/M428L/N434S

SEQ ID NO: 2130 - protein, 213 aa, synthetic construct; identical to SEQ ID NO: 2112
  source 1..213: note = XENP45930 Chain 3 - CEA-A[CEACAM5]_L2.20

SEQ ID NO: 2131 - protein, 450 aa, synthetic construct; identical to SEQ ID NO: 2098
  source 1..450: note = XENP45931 Chain 1 - CEA-A[CEACAM5]_H1.17_IgG1_pI(-)_Isosteric_A_PVA_/S267K/L368 D/K370S/M428L/N434S

SEQ ID NO: 2132 - protein, 479 aa, synthetic construct; identical to SEQ ID NO: 519
  source 1..479: note = XENP45931 Chain 2 - 1A7[CD28]_H1.14_L1.71_VH_G46C_VL_Q108C_scFv(GKPGS)4_Fc(216) _IgG1_C220S/PVA_/S267K/S364K/E357Q/M428L/N434S

SEQ ID NO: 2133 - protein, 213 aa, synthetic construct; identical to SEQ ID NO: 2115
  source 1..213: note = XENP45931 Chain 3 - CEA-A[CEACAM5]_L2.67

SEQ ID NO: 2134 - protein, 450 aa, synthetic construct; identical to SEQ ID NO: 2101
  source 1..450: note = XENP45932 Chain 1 - CEA-A[CEACAM5]_H1.49_IgG1_pI(-)_Isosteric_A_PVA_/S267K/L368 D/K370S/M428L/N434S

SEQ ID NO: 2135 - protein, 479 aa, synthetic construct; identical to SEQ ID NO: 519
  source 1..479: note = XENP45932 Chain 2 - 1A7[CD28]_H1.14_L1.71_VH_G46C_VL_Q108C_scFv(GKPGS)4_Fc(216) _IgG1_C220S/PVA_/S267K/S364K/E357Q/M428L/N434S

SEQ ID NO: 2136 - protein, 213 aa, synthetic construct; identical to SEQ ID NO: 2112
  source 1..213: note = XENP45932 Chain 3 - CEA-A[CEACAM5]_L2.20

SEQ ID NO: 2137 - protein, 450 aa, synthetic construct; identical to SEQ ID NO: 2101
  source 1..450: note = XENP45933 Chain 1 - CEA-A[CEACAM5]_H1.49_IgG1_pI(-)_Isosteric_A_PVA_/S267K/L368 D/K370S/M428L/N434S

SEQ ID NO: 2138 - protein, 479 aa, synthetic construct; identical to SEQ ID NO: 519
  source 1..479: note = XENP45933 Chain 2 - 1A7[CD28]_H1.14_L1.71_VH_G46C_VL_Q108C_scFv(GKPGS)4_Fc(216) _IgG1_C220S/PVA_/S267K/S364K/E357Q/M428L/N434S

SEQ ID NO: 2139 - protein, 213 aa, synthetic construct; identical to SEQ ID NO: 2115
  source 1..213: note = XENP45933 Chain 3 - CEA-A[CEACAM5]_L2.67

SEQ ID NO: 2140 - protein, 450 aa, synthetic construct
  source 1..450: note = XENP46035 Chain 1 - CEA-A[CEACAM5]_H0_IgG1_pI(-)_Isosteric_A_PVA_/S267K/L368D/K 370S/M428L/N434S
EVKLVESGGGLVQPGGSLRLSCATSGFTFTDYYMNWVRQPPGKALEWLGFIGNKANGYTTEYSASVKGRFTISRDKSQSILYLQMNTLRAEDSATYYCTRDRGLRFYFDYWGQGTTLTVSSASTKGPSVFPLAPSSKSTSGGTAALGCLVKDYFPEPVTVSWNSGALTSGVHTFPAVLQSSGLYSLSSVVTVPSSSLGTQTYICNVNHKPSDTKVDKKVEPKSCDKTHTCPPCPAPPVAGPSVFLFPPKPKDTLMISRTPEVTCVVVDVKHEDPEVKFNWYVDGVEVHNAKTKPREEEYNSTYRVVSVLTVLHQDWLNGKEYKCKVSNKALPAPIEKTISKAKGQPREPQVYTLPPSREEMTKNQVSLTCDVSGFYPSDIAVEWESDGQPENNYKTTPPVLDSDGSFFLYSKLTVDKSRWEQGDVFSCSVLHEALHSHYTQKSLSLSPGK

SEQ ID NO: 2141 - protein, 479 aa, synthetic construct; identical to SEQ ID NO: 519
  source 1..479: note = XENP46035 Chain 2 - 1A7[CD28]_H1.14_L1.71_VH_G46C_VL_Q108C_scFv(GKPGS)4_Fc(216) _IgG1_C220S/PVA_/S267K/S364K/E357Q/M428L/N434S

SEQ ID NO: 2142 - protein, 213 aa, synthetic construct; identical to SEQ ID NO: 1950
  source 1..213: note = XENP46035 Chain 3 - CEA-A[CEACAM5]_L0

SEQ ID NO: 2143 - protein, 450 aa, synthetic construct
  source 1..450: note = XENP46036 Chain 1 - CEA-A[CEACAM5]_H0.1_IgG1_pI(-)_Isosteric_A_PVA_/S267K/L368D /K370S/M428L/N434S
EVKLVESGGGLVQPGGSLRLSCATSGFTFTDYYMNWVRQPPGKALEWLGFIGNKVNGYTTEYSASVKGRFTISRDKSQSILYLQMNTLRAEDSATYYCTRDRGLRFYFDYWGQGTTLTVSSASTKGPSVFPLAPSSKSTSGGTAALGCLVKDYFPEPVTVSWNSGALTSGVHTFPAVLQSSGLYSLSSVVTVPSSSLGTQTYICNVNHKPSDTKVDKKVEPKSCDKTHTCPPCPAPPVAGPSVFLFPPKPKDTLMISRTPEVTCVVVDVKHEDPEVKFNWYVDGVEVHNAKTKPREEEYNSTYRVVSVLTVLHQDWLNGKEYKCKVSNKALPAPIEKTISKAKGQPREPQVYTLPPSREEMTKNQVSLTCDVSGFYPSDIAVEWESDGQPENNYKTTPPVLDSDGSFFLYSKLTVDKSRWEQGDVFSCSVLHEALHSHYTQKSLSLSPGK

SEQ ID NO: 2144 - protein, 479 aa, synthetic construct; identical to SEQ ID NO: 519
  source 1..479: note = XENP46036 Chain 2 - 1A7[CD28]_H1.14_L1.71_VH_G46C_VL_Q108C_scFv(GKPGS)4_Fc(216) _IgG1_C220S/PVA_/S267K/S364K/E357Q/M428L/N434S

SEQ ID NO: 2145 - protein, 213 aa, synthetic construct; identical to SEQ ID NO: 1950
  source 1..213: note = XENP46036 Chain 3 - CEA-A[CEACAM5]_L0

SEQ ID NO: 2146 - protein, 450 aa, synthetic construct
  source 1..450: note = XENP46037 Chain 1 - CEA-A[CEACAM5]_H0.2_IgG1_pI(-)_Isosteric_A_PVA_/S267K/L368D /K370S/M428L/N434S
EVKLVESGGGLVQPGGSLRLSCATSGFTFTDYYMNWVRQPPGKALEWLGFIGNKANGYTTEYSASVKGRFTISRDKSQSILYLQMNTLRAEDSATYYCTRDRGIRFYFDYWGQGTTLTVSSASTKGPSVFPLAPSSKSTSGGTAALGCLVKDYFPEPVTVSWNSGALTSGVHTFPAVLQSSGLYSLSSVVTVPSSSLGTQTYICNVNHKPSDTKVDKKVEPKSCDKTHTCPPCPAPPVAGPSVFLFPPKPKDTLMISRTPEVTCVVVDVKHEDPEVKFNWYVDGVEVHNAKTKPREEEYNSTYRVVSVLTVLHQDWLNGKEYKCKVSNKALPAPIEKTISKAKGQPREPQVYTLPPSREEMTKNQVSLTCDVSGFYPSDIAVEWESDGQPENNYKTTPPVLDSDGSFFLYSKLTVDKSRWEQGDVFSCSVLHEALHSHYTQKSLSLSPGK

SEQ ID NO: 2147 - protein, 479 aa, synthetic construct; identical to SEQ ID NO: 519
  source 1..479: note = XENP46037 Chain 2 - 1A7[CD28]_H1.14_L1.71_VH_G46C_VL_Q108C_scFv(GKPGS)4_Fc(216) _IgG1_C220S/PVA_/S267K/S364K/E357Q/M428L/N434S

SEQ ID NO: 2148 - protein, 213 aa, synthetic construct; identical to SEQ ID NO: 1950
  source 1..213: note = XENP46037 Chain 3 - CEA-A[CEACAM5]_L0

SEQ ID NO: 2149 - protein, 450 aa, synthetic construct
  source 1..450: note = XENP46038 Chain 1 - CEA-A[CEACAM5]_H0.3_IgG1_pI(-)_Isosteric_A_PVA_/S267K/L368D /K370S/M428L/N434S
EVKLVESGGGLVQPGGSLRLSCATSGFTFTDYYMNWVRQPPGKALEWLGFIGNKANGYTTEYSASVKGRFTISRDKSQSILYLQMNTLRAEDSATYYCTRDRGVRFYFDYWGQGTTLTVSSASTKGPSVFPLAPSSKSTSGGTAALGCLVKDYFPEPVTVSWNSGALTSGVHTFPAVLQSSGLYSLSSVVTVPSSSLGTQTYICNVNHKPSDTKVDKKVEPKSCDKTHTCPPCPAPPVAGPSVFLFPPKPKDTLMISRTPEVTCVVVDVKHEDPEVKFNWYVDGVEVHNAKTKPREEEYNSTYRVVSVLTVLHQDWLNGKEYKCKVSNKALPAPIEKTISKAKGQPREPQVYTLPPSREEMTKNQVSLTCDVSGFYPSDIAVEWESDGQPENNYKTTPPVLDSDGSFFLYSKLTVDKSRWEQGDVFSCSVLHEALHSHYTQKSLSLSPGK

SEQ ID NO: 2150 - protein, 479 aa, synthetic construct; identical to SEQ ID NO: 519
  source 1..479: note = XENP46038 Chain 2 - 1A7[CD28]_H1.14_L1.71_VH_G46C_VL_Q108C_scFv(GKPGS)4_Fc(216) _IgG1_C220S/PVA_/S267K/S364K/E357Q/M428L/N434S

SEQ ID NO: 2151 - protein, 213 aa, synthetic construct; identical to SEQ ID NO: 1950
  source 1..213: note = XENP46038 Chain 3 - CEA-A[CEACAM5]_L0

SEQ ID NO: 2152 - protein, 450 aa, synthetic construct
  source 1..450: note = XENP46039 Chain 1 - CEA-A[CEACAM5]_H0.4_IgG1_pI(-)_Isosteric_A_PVA_/S267K/L368D /K370S/M428L/N434S
EVKLVESGGGLVQPGGSLRLSCATSGFTFTDYYMNWVRQPPGKALEWLGFIGNKANGYTTEYSASVKGRFTISRDKSQSILYLQMNTLRAEDSATYYCTRDRGLRFAFDYWGQGTTLTVSSASTKGPSVFPLAPSSKSTSGGTAALGCLVKDYFPEPVTVSWNSGALTSGVHTFPAVLQSSGLYSLSSVVTVPSSSLGTQTYICNVNHKPSDTKVDKKVEPKSCDKTHTCPPCPAPPVAGPSVFLFPPKPKDTLMISRTPEVTCVVVDVKHEDPEVKFNWYVDGVEVHNAKTKPREEEYNSTYRVVSVLTVLHQDWLNGKEYKCKVSNKALPAPIEKTISKAKGQPREPQVYTLPPSREEMTKNQVSLTCDVSGFYPSDIAVEWESDGQPENNYKTTPPVLDSDGSFFLYSKLTVDKSRWEQGDVFSCSVLHEALHSHYTQKSLSLSPGK

SEQ ID NO: 2153 - protein, 479 aa, synthetic construct; identical to SEQ ID NO: 519
  source 1..479: note = XENP46039 Chain 2 - 1A7[CD28]_H1.14_L1.71_VH_G46C_VL_Q108C_scFv(GKPGS)4_Fc(216) _IgG1_C220S/PVA_/S267K/S364K/E357Q/M428L/N434S

SEQ ID NO: 2154 - protein, 213 aa, synthetic construct; identical to SEQ ID NO: 1950
  source 1..213: note = XENP46039 Chain 3 - CEA-A[CEACAM5]_L0

SEQ ID NO: 2155 - protein, 450 aa, synthetic construct; identical to SEQ ID NO: 2101
  source 1..450: note = XENP46238 Chain 1 - CEA-A[CEACAM5]_H1.49_IgG1_pI(-)_Isosteric_A_PVA_/S267K/L368 D/K370S/M428L/N434S

SEQ ID NO: 2156 - protein, 479 aa, synthetic construct; identical to SEQ ID NO: 2126
  source 1..479: note = XENP46238 Chain 2 - 1A7[CD28]_H1.106_L1_VH_G46C_VL_Q108C_scFv(GKPGS)4_Fc(216)_I gG1_C220S/PVA_/S267K/S364K/E357Q/M428L/N434S

SEQ ID NO: 2157 - protein, 213 aa, synthetic construct; identical to SEQ ID NO: 2115
  source 1..213: note = XENP46238 Chain 3 - CEA-A[CEACAM5]_L2.67

SEQ ID NO: 2158 - protein, 450 aa, synthetic construct; identical to SEQ ID NO: 2095
  source 1..450: note = XENP46322 Chain 1 - CEA-A[CEACAM5]_H1.13_IgG1_pI(-)_Isosteric_A_PVA_/S267K/L368 D/K370S/M428L/N434S

SEQ ID NO: 2159 - protein, 479 aa, synthetic construct; identical to SEQ ID NO: 501
  source 1..479: note = XENP46322 Chain 2 - 1A7[CD28]_H1.129_L1_VH_G46C_VL_Q108C_scFv(GKPGS)4_Fc(216)_I gG1_C220S/PVA_/S267K/S364K/E357Q/M428L/N434S

SEQ ID NO: 2160 - protein, 213 aa, synthetic construct; identical to SEQ ID NO: 2049
  source 1..213: note = XENP46322 Chain 3 - CEA-A[CEACAM5]_L2.15

SEQ ID NO: 2161 - protein, 450 aa, synthetic construct; identical to SEQ ID NO: 2143
  source 1..450: note = XENP46323 Chain 1 - CEA-A[CEACAM5]_H0.1_IgG1_pI(-)_Isosteric_A_PVA_/S267K/L368D /K370S/M428L/N434S

SEQ ID NO: 2162 - protein, 479 aa, synthetic construct; identical to SEQ ID NO: 501
  source 1..479: note = XENP46323 Chain 2 - 1A7[CD28]_H1.129_L1_VH_G46C_VL_Q108C_scFv(GKPGS)4_Fc(216)_I gG1_C220S/PVA_/S267K/S364K/E357Q/M428L/N434S

SEQ ID NO: 2163 - protein, 213 aa, synthetic construct; identical to SEQ ID NO: 1950
  source 1..213: note = XENP46323 Chain 3 - CEA-A[CEACAM5]_L0

SEQ ID NO: 2164 - protein, 450 aa, synthetic construct; identical to SEQ ID NO: 2095
  source 1..450: note = XENP46327 Chain 1 - CEA-A[CEACAM5]_H1.13_IgG1_pI(-)_Isosteric_A_PVA_/S267K/L368 D/K370S/M428L/N434S

SEQ ID NO: 2165 - protein, 479 aa, synthetic construct
  source 1..479: note = XENP46327 Chain 2 - 1A7[CD28]_H1.106_L1_VH_G46C_VL_Q108C_scFv(GKPGS)4_Fc(216)_I gG1_C220S/PVA_/S267K/S364K/E357Q/M428L/N434S
EVQLLESGGGLVQPGGSLRLSCAASGFTFSSYYMSWVRQAPGKCLEWVSTISERGDSTYYADSVKGRFTISRDNSKNTLYLQMNSLRAEDTAVYYCAKSGPGLRQVGFDYWGQGTLVTVSSGKPGSGKPGSGKPGSGKPGSDIQMTQSPSSLSASVGDRVTITCRASQSISSYLNWYQQKPGKAPKLLIYAASSLQSGVPSRFSGSGSGTDFTLTISSLQPEDFATYYCQQSYSTPFTFGCGTKLEIKEPKSSDKTHTCPPCPAPPVAGPSVFLFPPKPKDTLMISRTPEVTCVVVDVKHEDPEVKFNWYVDGVEVHNAKTKPREEQYNSTYRVVSVLTVLHQDWLNGKEYKCKVSNKALPAPIEKTISKAKGQPREPQVYTLPPSREQMTKNQVKLTCLVKGFYPSDIAVEWESNGQPENNYKTTPPVLDSDGSFFLYSKLTVDKSRWQQGNVFSCSVLHEALHSHYTQKSLSLSPGK

SEQ ID NO: 2166 - protein, 213 aa, synthetic construct; identical to SEQ ID NO: 2049
  source 1..213: note = XENP46327 Chain 3 - CEA-A[CEACAM5]_L2.15

SEQ ID NO: 2167 - protein, 450 aa, synthetic construct; identical to SEQ ID NO: 2143
  source 1..450: note = XENP46328 Chain 1 - CEA-A[CEACAM5]_H0.1_IgG1_pI(-)_Isosteric_A_PVA_/S267K/L368D /K370S/M428L/N434S

SEQ ID NO: 2168 - protein, 479 aa, synthetic construct; identical to SEQ ID NO: 2165
  source 1..479: note = XENP46328 Chain 2 - 1A7[CD28]_H1.106_L1_VH_G46C_VL_Q108C_scFv(GKPGS)4_Fc(216)_I gG1_C220S/PVA_/S267K/S364K/E357Q/M428L/N434S

SEQ ID NO: 2169 - protein, 213 aa, synthetic construct; identical to SEQ ID NO: 1950
  source 1..213: note = XENP46328 Chain 3 - CEA-A[CEACAM5]_L0

SEQ ID NO: 2170 - protein, 121 aa, synthetic construct
  source 1..121: note = CEA-A_H1 Variable heavy (vh) domain
EVQLVESGGGLVQPGGSLRLSCATSGFTFTDYYMNWVRQAPGKALEWVGFIGNKANGYTTEYSASVKGRFTISRDKSKSSLYLQMNSLKTEDTAVYYCTRDRGLRFYFDYWGQGTLVTVSS

SEQ ID NO: 2171 - protein, 10 aa, synthetic construct
  source 1..10: note = CEA-A_H1 vhCDR1
GFTFTDYYMN

SEQ ID NO: 2172 - protein, 19 aa, synthetic construct
  source 1..19: note = CEA-A_H1 vhCDR2
FIGNKANGYTTEYSASVKG

SEQ ID NO: 2173 - protein, 10 aa, synthetic construct
  source 1..10: note = CEA-A_H1 vhCDR3
DRGLRFYFDY

SEQ ID NO: 2174 - protein, 106 aa, synthetic construct
  source 1..106: note = CEA-A_L1 Variable light (vl) domain
QTVLTQSPATLSLSPGERATLSCRASSSVTYIHWYQQKPGQSPRSLIYATSNLASGVPARFSGSGSGTDYTLTISSLEPEDFAVYYCQHWSSKPPTFGGGTKVEIK

SEQ ID NO: 2175 - protein, 10 aa, synthetic construct
  source 1..10: note = CEA-A_L1 vlCDR1
RASSSVTYIH

SEQ ID NO: 2176 - protein, 7 aa, synthetic construct
  source 1..7: note = CEA-A_L1 vlCDR2
ATSNLAS

SEQ ID NO: 2177 - protein, 9 aa, synthetic construct
  source 1..9: note = CEA-A_L1 vlCDR3
QHWSSKPPT

SEQ ID NO: 2178 - protein, 106 aa, synthetic construct
  source 1..106: note = CEA-A_L2 Variable light (vl) domain
EIVLTQSPATLSLSPGERATLSCRASSSVTYIHWYQQKPGQAPRLLIYATSNLASGIPARFSGSGSGTDFTLTISSLEPEDFAVYYCQHWSSKPPTFGGGTKVEIK

SEQ ID NO: 2179 - protein, 10 aa, synthetic construct
  source 1..10: note = CEA-A_L2 vlCDR1
RASSSVTYIH

SEQ ID NO: 2180 - protein, 7 aa, synthetic construct
  source 1..7: note = CEA-A_L2 vlCDR2
ATSNLAS

SEQ ID NO: 2181 - protein, 9 aa, synthetic construct
  source 1..9: note = CEA-A_L2 vlCDR3
QHWSSKPPT

SEQ ID NO: 2182 - protein, 121 aa, synthetic construct
  source 1..121: note = CEA-A_H1.13_L2.15 Variable heavy (vh) domain
EVQLVESGGGLVQPGGSLRLSCAASGFTFSDYYMNWVRQAPGKGLEWVGFIGNKANAYTTEYSASVKGRFTISRDKSKSSLYLQMNSLKTEDTAVYYCTRDRGLRFYFDYWGQGTLVTVSS

SEQ ID NO: 2183 - protein, 10 aa, synthetic construct
  source 1..10: note = CEA-A_H1.13_L2.15 vhCDR1
GFTFSDYYMN

SEQ ID NO: 2184 - protein, 19 aa, synthetic construct
  source 1..19: note = CEA-A_H1.13_L2.15 vhCDR2
FIGNKANAYTTEYSASVKG

SEQ ID NO: 2185 - protein, 10 aa, synthetic construct
  source 1..10: note = CEA-A_H1.13_L2.15 vhCDR3
DRGLRFYFDY

SEQ ID NO: 2186 - protein, 106 aa, synthetic construct
  source 1..106: note = CEA-A_H1.13_L2.15 Variable light (vl) domain
EIVLTQSPATLSLSPGERATLSCRASSSVTYIHWYQQKPGQAPKSLIYATSNLASGIPARFSGSGSGTDFTLTISSLEPEDFAVYYCQHWSSKPPTFGGGTKVEIK

SEQ ID NO: 2187 - protein, 10 aa, synthetic construct
  source 1..10: note = CEA-A_H1.13_L2.15 vlCDR1
RASSSVTYIH

SEQ ID NO: 2188 - protein, 7 aa, synthetic construct
  source 1..7: note = CEA-A_H1.13_L2.15 vlCDR2
ATSNLAS

SEQ ID NO: 2189 - protein, 9 aa, synthetic construct
  source 1..9: note = CEA-A_H1.13_L2.15 vlCDR3
QHWSSKPPT

SEQ ID NO: 2190 - protein, 121 aa, synthetic construct
  source 1..121: note = CEA-A[CEACAM5]_H1.1
EVQLVESGGGLVQPGGSLRLSCAASGFTFTDYYMNWVRQAPGKALEWVGFIGNKANGYTTEYSASVKGRFTISRDKSKSSLYLQMNSLKTEDTAVYYCTRDRGLRFYFDYWGQGTLVTVSS

SEQ ID NO: 2191 - protein, 121 aa, synthetic construct
  source 1..121: note = CEA-A[CEACAM5]_H1.2
EVQLVESGGGLVQPGGSLRLSCATSGFTFTDYYMNWVRQAPGKGLEWVGFIGNKANGYTTEYSASVKGRFTISRDKSKSSLYLQMNSLKTEDTAVYYCTRDRGLRFYFDYWGQGTLVTVSS

SEQ ID NO: 2192 - protein, 121 aa, synthetic construct
  source 1..121: note = CEA-A[CEACAM5]_H1.3
EVQLVESGGGLVQPGGSLRLSCATSGFTFTDYYMNWVRQAPGKALEWVGFIGNKANAYTTEYSASVKGRFTISRDKSKSSLYLQMNSLKTEDTAVYYCTRDRGLRFYFDYWGQGTLVTVSS

SEQ ID NO: 2193 - protein, 121 aa, synthetic construct
  source 1..121: note = CEA-A[CEACAM5]_H1.4
EVQLVESGGGLVQPGGSLRLSCAASGFTFTDYYMNWVRQAPGKGLEWVGFIGNKANGYTTEYSASVKGRFTISRDKSKSSLYLQMNSLKTEDTAVYYCTRDRGLRFYFDYWGQGTLVTVSS

SEQ ID NO: 2194 - protein, 121 aa, synthetic construct
  source 1..121: note = CEA-A[CEACAM5]_H1.5
EVQLVESGGGLVQPGGSLRLSCAASGFTFTDYYMNWVRQAPGKALEWVGFIGNKANAYTTEYSASVKGRFTISRDKSKSSLYLQMNSLKTEDTAVYYCTRDRGLRFYFDYWGQGTLVTVSS

SEQ ID NO: 2195 - protein, 121 aa, synthetic construct
  source 1..121: note = CEA-A[CEACAM5]_H1.6
EVQLVESGGGLVQPGGSLRLSCATSGFTFTDYYMNWVRQAPGKGLEWVGFIGNKANAYTTEYSASVKGRFTISRDKSKSSLYLQMNSLKTEDTAVYYCTRDRGLRFYFDYWGQGTLVTVSS

SEQ ID NO: 2196 - protein, 121 aa, synthetic construct
  source 1..121: note = CEA-A[CEACAM5]_H1.7
EVQLVESGGGLVQPGGSLRLSCAASGFTFTDYYMNWVRQAPGKGLEWVGFIGNKANAYTTEYSASVKGRFTISRDKSKSSLYLQMNSLKTEDTAVYYCTRDRGLRFYFDYWGQGTLVTVSS

SEQ ID NO: 2197 - protein, 121 aa, synthetic construct
  source 1..121: note = CEA-A[CEACAM5]_H1.8
EVQLVESGGGLVQPGGSLRLSCAASGFTFADYYMNWVRQAPGKGLEWVGFIGNKANAYTTEYSASVKGRFTISRDKSKSSLYLQMNSLKTEDTAVYYCTRDRGLRFYFDYWGQGTLVTVSS

SEQ ID NO: 2198 - protein, 121 aa, synthetic construct
  source 1..121: note = CEA-A[CEACAM5]_H1.9
EVQLVESGGGLVQPGGSLRLSCAASGFTFEDYYMNWVRQAPGKGLEWVGFIGNKANAYTTEYSASVKGRFTISRDKSKSSLYLQMNSLKTEDTAVYYCTRDRGLRFYFDYWGQGTLVTVSS

SEQ ID NO: 2199 - protein, 121 aa, synthetic construct
  source 1..121: note = CEA-A[CEACAM5]_H1.10
EVQLVESGGGLVQPGGSLRLSCAASGFTFIDYYMNWVRQAPGKGLEWVGFIGNKANAYTTEYSASVKGRFTISRDKSKSSLYLQMNSLKTEDTAVYYCTRDRGLRFYFDYWGQGTLVTVSS

SEQ ID NO: 2200 - protein, 121 aa, synthetic construct
  source 1..121: note = CEA-A[CEACAM5]_H1.11
EVQLVESGGGLVQPGGSLRLSCAASGFTFKDYYMNWVRQAPGKGLEWVGFIGNKANAYTTEYSASVKGRFTISRDKSKSSLYLQMNSLKTEDTAVYYCTRDRGLRFYFDYWGQGTLVTVSS

SEQ ID NO: 2201 - protein, 121 aa, synthetic construct
  source 1..121: note = CEA-A[CEACAM5]_H1.12
EVQLVESGGGLVQPGGSLRLSCAASGFTFQDYYMNWVRQAPGKGLEWVGFIGNKANAYTTEYSASVKGRFTISRDKSKSSLYLQMNSLKTEDTAVYYCTRDRGLRFYFDYWGQGTLVTVSS

SEQ ID NO: 2202 - protein, 121 aa, synthetic construct; identical to SEQ ID NO: 2182
  source 1..121: note = CEA-A[CEACAM5]_H1.13

SEQ ID NO: 2203 - protein, 121 aa, synthetic construct
  source 1..121: note = CEA-A[CEACAM5]_H1.14
EVQLVESGGGLVQPGGSLRLSCAASGFTFVDYYMNWVRQAPGKGLEWVGFIGNKANAYTTEYSASVKGRFTISRDKSKSSLYLQMNSLKTEDTAVYYCTRDRGLRFYFDYWGQGTLVTVSS

SEQ ID NO: 2204 - protein, 121 aa, synthetic construct
  source 1..121: note = CEA-A[CEACAM5]_H1.15
EVQLVESGGGLVQPGGSLRLSCAASGFTFTAYYMNWVRQAPGKGLEWVGFIGNKANAYTTEYSASVKGRFTISRDKSKSSLYLQMNSLKTEDTAVYYCTRDRGLRFYFDYWGQGTLVTVSS

SEQ ID NO: 2205 - protein, 121 aa, synthetic construct
  source 1..121: note = CEA-A[CEACAM5]_H1.16
EVQLVESGGGLVQPGGSLRLSCAASGFTFTEYYMNWVRQAPGKGLEWVGFIGNKANAYTTEYSASVKGRFTISRDKSKSSLYLQMNSLKTEDTAVYYCTRDRGLRFYFDYWGQGTLVTVSS

SEQ ID NO: 2206 - protein, 121 aa, synthetic construct
  source 1..121: note = CEA-A[CEACAM5]_H1.17
EVQLVESGGGLVQPGGSLRLSCAASGFTFTHYYMNWVRQAPGKGLEWVGFIGNKANAYTTEYSASVKGRFTISRDKSKSSLYLQMNSLKTEDTAVYYCTRDRGLRFYFDYWGQGTLVTVSS

SEQ ID NO: 2207 - protein, 121 aa, synthetic construct
  source 1..121: note = CEA-A[CEACAM5]_H1.18
EVQLVESGGGLVQPGGSLRLSCAASGFTFTKYYMNWVRQAPGKGLEWVGFIGNKANAYTTEYSASVKGRFTISRDKSKSSLYLQMNSLKTEDTAVYYCTRDRGLRFYFDYWGQGTLVTVSS

SEQ ID NO: 2208 - protein, 121 aa, synthetic construct
  source 1..121: note = CEA-A[CEACAM5]_H1.19
EVQLVESGGGLVQPGGSLRLSCAASGFTFTNYYMNWVRQAPGKGLEWVGFIGNKANAYTTEYSASVKGRFTISRDKSKSSLYLQMNSLKTEDTAVYYCTRDRGLRFYFDYWGQGTLVTVSS

SEQ ID NO: 2209 - protein, 121 aa, synthetic construct
  source 1..121: note = CEA-A[CEACAM5]_H1.20
EVQLVESGGGLVQPGGSLRLSCAASGFTFTSYYMNWVRQAPGKGLEWVGFIGNKANAYTTEYSASVKGRFTISRDKSKSSLYLQMNSLKTEDTAVYYCTRDRGLRFYFDYWGQGTLVTVSS

SEQ ID NO: 2210 - protein, 121 aa, synthetic construct
  source 1..121: note = CEA-A[CEACAM5]_H1.21
EVQLVESGGGLVQPGGSLRLSCAASGFTFTTYYMNWVRQAPGKGLEWVGFIGNKANAYTTEYSASVKGRFTISRDKSKSSLYLQMNSLKTEDTAVYYCTRDRGLRFYFDYWGQGTLVTVSS

SEQ ID NO: 2211 - protein, 121 aa, synthetic construct
  source 1..121: note = CEA-A[CEACAM5]_H1.22
EVQLVESGGGLVQPGGSLRLSCAASGFTFTDAYMNWVRQAPGKGLEWVGFIGNKANAYTTEYSASVKGRFTISRDKSKSSLYLQMNSLKTEDTAVYYCTRDRGLRFYFDYWGQGTLVTVSS

SEQ ID NO: 2212 - protein, 121 aa, synthetic construct
  source 1..121: note = CEA-A[CEACAM5]_H1.23
EVQLVESGGGLVQPGGSLRLSCAASGFTFTDEYMNWVRQAPGKGLEWVGFIGNKANAYTTEYSASVKGRFTISRDKSKSSLYLQMNSLKTEDTAVYYCTRDRGLRFYFDYWGQGTLVTVSS

SEQ ID NO: 2213 - protein, 121 aa, synthetic construct
  source 1..121: note = CEA-A[CEACAM5]_H1.24
EVQLVESGGGLVQPGGSLRLSCAASGFTFTDFYMNWVRQAPGKGLEWVGFIGNKANAYTTEYSASVKGRFTISRDKSKSSLYLQMNSLKTEDTAVYYCTRDRGLRFYFDYWGQGTLVTVSS

SEQ ID NO: 2214 - protein, 121 aa, synthetic construct
  source 1..121: note = CEA-A[CEACAM5]_H1.25
EVQLVESGGGLVQPGGSLRLSCAASGFTFTDHYMNWVRQAPGKGLEWVGFIGNKANAYTTEYSASVKGRFTISRDKSKSSLYLQMNSLKTEDTAVYYCTRDRGLRFYFDYWGQGTLVTVSS

SEQ ID NO: 2215 - protein, 121 aa, synthetic construct
  source 1..121: note = CEA-A[CEACAM5]_H1.26
EVQLVESGGGLVQPGGSLRLSCAASGFTFTDKYMNWVRQAPGKGLEWVGFIGNKANAYTTEYSASVKGRFTISRDKSKSSLYLQMNSLKTEDTAVYYCTRDRGLRFYFDYWGQGTLVTVSS

SEQ ID NO: 2216 - protein, 121 aa, synthetic construct
  source 1..121: note = CEA-A[CEACAM5]_H1.27
EVQLVESGGGLVQPGGSLRLSCAASGFTFTDLYMNWVRQAPGKGLEWVGFIGNKANAYTTEYSASVKGRFTISRDKSKSSLYLQMNSLKTEDTAVYYCTRDRGLRFYFDYWGQGTLVTVSS

SEQ ID NO: 2217 - protein, 121 aa, synthetic construct
  source 1..121: note = CEA-A[CEACAM5]_H1.28
EVQLVESGGGLVQPGGSLRLSCAASGFTFTDVYMNWVRQAPGKGLEWVGFIGNKANAYTTEYSASVKGRFTISRDKSKSSLYLQMNSLKTEDTAVYYCTRDRGLRFYFDYWGQGTLVTVSS

SEQ ID NO: 2218 - protein, 121 aa, synthetic construct
  source 1..121: note = CEA-A[CEACAM5]_H1.29
EVQLVESGGGLVQPGGSLRLSCAASGFTFTDYAMNWVRQAPGKGLEWVGFIGNKANAYTTEYSASVKGRFTISRDKSKSSLYLQMNSLKTEDTAVYYCTRDRGLRFYFDYWGQGTLVTVSS

SEQ ID NO: 2219 - protein, 121 aa, synthetic construct
  source 1..121: note = CEA-A[CEACAM5]_H1.30
EVQLVESGGGLVQPGGSLRLSCAASGFTFTDYDMNWVRQAPGKGLEWVGFIGNKANAYTTEYSASVKGRFTISRDKSKSSLYLQMNSLKTEDTAVYYCTRDRGLRFYFDYWGQGTLVTVSS

SEQ ID NO: 2220 - protein, 121 aa, synthetic construct
  source 1..121: note = CEA-A[CEACAM5]_H1.31
EVQLVESGGGLVQPGGSLRLSCAASGFTFTDYFMNWVRQAPGKGLEWVGFIGNKANAYTTEYSASVKGRFTISRDKSKSSLYLQMNSLKTEDTAVYYCTRDRGLRFYFDYWGQGTLVTVSS

SEQ ID NO: 2221 - protein, 121 aa, synthetic construct
  source 1..121: note = CEA-A[CEACAM5]_H1.32
EVQLVESGGGLVQPGGSLRLSCAASGFTFTDYHMNWVRQAPGKGLEWVGFIGNKANAYTTEYSASVKGRFTISRDKSKSSLYLQMNSLKTEDTAVYYCTRDRGLRFYFDYWGQGTLVTVSS

SEQ ID NO: 2222 - protein, 121 aa, synthetic construct
  source 1..121: note = CEA-A[CEACAM5]_H1.33
EVQLVESGGGLVQPGGSLRLSCAASGFTFTDYKMNWVRQAPGKGLEWVGFIGNKANAYTTEYSASVKGRFTISRDKSKSSLYLQMNSLKTEDTAVYYCTRDRGLRFYFDYWGQGTLVTVSS

SEQ ID NO: 2223 - protein, 121 aa, synthetic construct
  source 1..121: note = CEA-A[CEACAM5]_H1.34
EVQLVESGGGLVQPGGSLRLSCAASGFTFTDYLMNWVRQAPGKGLEWVGFIGNKANAYTTEYSASVKGRFTISRDKSKSSLYLQMNSLKTEDTAVYYCTRDRGLRFYFDYWGQGTLVTVSS

SEQ ID NO: 2224 - protein, 121 aa, synthetic construct
  source 1..121: note = CEA-A[CEACAM5]_H1.35
EVQLVESGGGLVQPGGSLRLSCAASGFTFTDYVMNWVRQAPGKGLEWVGFIGNKANAYTTEYSASVKGRFTISRDKSKSSLYLQMNSLKTEDTAVYYCTRDRGLRFYFDYWGQGTLVTVSS

SEQ ID NO: 2225 - protein, 121 aa, synthetic construct
  source 1..121: note = CEA-A[CEACAM5]_H1.36
EVQLVESGGGLVQPGGSLRLSCAASGFTFTDYYINWVRQAPGKGLEWVGFIGNKANAYTTEYSASVKGRFTISRDKSKSSLYLQMNSLKTEDTAVYYCTRDRGLRFYFDYWGQGTLVTVSS

SEQ ID NO: 2226 - protein, 121 aa, synthetic construct
  source 1..121: note = CEA-A[CEACAM5]_H1.37
EVQLVESGGGLVQPGGSLRLSCAASGFTFTDYYLNWVRQAPGKGLEWVGFIGNKANAYTTEYSASVKGRFTISRDKSKSSLYLQMNSLKTEDTAVYYCTRDRGLRFYFDYWGQGTLVTVSS

SEQ ID NO: 2227 - protein, 121 aa, synthetic construct
  source 1..121: note = CEA-A[CEACAM5]_H1.38
EVQLVESGGGLVQPGGSLRLSCAASGFTFTDYYVNWVRQAPGKGLEWVGFIGNKANAYTTEYSASVKGRFTISRDKSKSSLYLQMNSLKTEDTAVYYCTRDRGLRFYFDYWGQGTLVTVSS

SEQ ID NO: 2228 - protein, 121 aa, synthetic construct
  source 1..121: note = CEA-A[CEACAM5]_H1.39
EVQLVESGGGLVQPGGSLRLSCAASGFTFTDYYMDWVRQAPGKGLEWVGFIGNKANAYTTEYSASVKGRFTISRDKSKSSLYLQMNSLKTEDTAVYYCTRDRGLRFYFDYWGQGTLVTVSS

SEQ ID NO: 2229 - protein, 121 aa, synthetic construct
  source 1..121: note = CEA-A[CEACAM5]_H1.40
EVQLVESGGGLVQPGGSLRLSCAASGFTFTDYYMGWVRQAPGKGLEWVGFIGNKANAYTTEYSASVKGRFTISRDKSKSSLYLQMNSLKTEDTAVYYCTRDRGLRFYFDYWGQGTLVTVSS

SEQ ID NO: 2230 - protein, 121 aa, synthetic construct
  source 1..121: note = CEA-A[CEACAM5]_H1.41
EVQLVESGGGLVQPGGSLRLSCAASGFTFTDYYMHWVRQAPGKGLEWVGFIGNKANAYTTEYSASVKGRFTISRDKSKSSLYLQMNSLKTEDTAVYYCTRDRGLRFYFDYWGQGTLVTVSS

SEQ ID NO: 2231 - protein, 121 aa, synthetic construct
  source 1..121: note = CEA-A[CEACAM5]_H1.42
EVQLVESGGGLVQPGGSLRLSCAASGFTFTDYYMSWVRQAPGKGLEWVGFIGNKANAYTTEYSASVKGRFTISRDKSKSSLYLQMNSLKTEDTAVYYCTRDRGLRFYFDYWGQGTLVTVSS

SEQ ID NO: 2232 - protein, 121 aa, synthetic construct
  source 1..121: note = CEA-A[CEACAM5]_H1.43
EVQLVESGGGLVQPGGSLRLSCAASGFTFTDYYMTWVRQAPGKGLEWVGFIGNKANAYTTEYSASVKGRFTISRDKSKSSLYLQMNSLKTEDTAVYYCTRDRGLRFYFDYWGQGTLVTVSS

SEQ ID NO: 2233 - protein, 121 aa, synthetic construct
  source 1..121: note = CEA-A[CEACAM5]_H1.44
EVQLVESGGGLVQPGGSLRLSCAASGFTFTDYYMNWVRQAPGKGLEWVGFIANKANAYTTEYSASVKGRFTISRDKSKSSLYLQMNSLKTEDTAVYYCTRDRGLRFYFDYWGQGTLVTVSS

SEQ ID NO: 2234 - protein, 121 aa, synthetic construct
  source 1..121: note = CEA-A[CEACAM5]_H1.45
EVQLVESGGGLVQPGGSLRLSCAASGFTFTDYYMNWVRQAPGKGLEWVGFIDNKANAYTTEYSASVKGRFTISRDKSKSSLYLQMNSLKTEDTAVYYCTRDRGLRFYFDYWGQGTLVTVSS

SEQ ID NO: 2235 - protein, 121 aa, synthetic construct
  source 1..121: note = CEA-A[CEACAM5]_H1.46
EVQLVESGGGLVQPGGSLRLSCAASGFTFTDYYMNWVRQAPGKGLEWVGFIHNKANAYTTEYSASVKGRFTISRDKSKSSLYLQMNSLKTEDTAVYYCTRDRGLRFYFDYWGQGTLVTVSS

SEQ ID NO: 2236 - protein, 121 aa, synthetic construct
  source 1..121: note = CEA-A[CEACAM5]_H1.47
EVQLVESGGGLVQPGGSLRLSCAASGFTFTDYYMNWVRQAPGKGLEWVGFIKNKANAYTTEYSASVKGRFTISRDKSKSSLYLQMNSLKTEDTAVYYCTRDRGLRFYFDYWGQGTLVTVSS

SEQ ID NO: 2237 - protein, 121 aa, synthetic construct
  source 1..121: note = CEA-A[CEACAM5]_H1.48
EVQLVESGGGLVQPGGSLRLSCAASGFTFTDYYMNWVRQAPGKGLEWVGFIQNKANAYTTEYSASVKGRFTISRDKSKSSLYLQMNSLKTEDTAVYYCTRDRGLRFYFDYWGQGTLVTVSS

SEQ ID NO: 2238 - protein, 121 aa, synthetic construct
  source 1..121: note = CEA-A[CEACAM5]_H1.49
EVQLVESGGGLVQPGGSLRLSCAASGFTFTDYYMNWVRQAPGKGLEWVGFISNKANAYTTEYSASVKGRFTISRDKSKSSLYLQMNSLKTEDTAVYYCTRDRGLRFYFDYWGQGTLVTVSS

SEQ ID NO: 2239 - protein, 121 aa, synthetic construct
  source 1..121: note = CEA-A[CEACAM5]_H1.50
EVQLVESGGGLVQPGGSLRLSCAASGFTFTDYYMNWVRQAPGKGLEWVGFITNKANAYTTEYSASVKGRFTISRDKSKSSLYLQMNSLKTEDTAVYYCTRDRGLRFYFDYWGQGTLVTVSS

SEQ ID NO: 2240 - protein, 121 aa, synthetic construct
  source 1..121: note = CEA-A[CEACAM5]_H1.51
EVQLVESGGGLVQPGGSLRLSCAASGFTFTDYYMNWVRQAPGKGLEWVGFIGEKANAYTTEYSASVKGRFTISRDKSKSSLYLQMNSLKTEDTAVYYCTRDRGLRFYFDYWGQGTLVTVSS

SEQ ID NO: 2241 - protein, 121 aa, synthetic construct
  source 1..121: note = CEA-A[CEACAM5]_H1.52
EVQLVESGGGLVQPGGSLRLSCAASGFTFTDYYMNWVRQAPGKGLEWVGFIGHKANAYTTEYSASVKGRFTISRDKSKSSLYLQMNSLKTEDTAVYYCTRDRGLRFYFDYWGQGTLVTVSS

SEQ ID NO: 2242 - protein, 121 aa, synthetic construct
  source 1..121: note = CEA-A[CEACAM5]_H1.53
EVQLVESGGGLVQPGGSLRLSCAASGFTFTDYYMNWVRQAPGKGLEWVGFIGQKANAYTTEYSASVKGRFTISRDKSKSSLYLQMNSLKTEDTAVYYCTRDRGLRFYFDYWGQGTLVTVSS

SEQ ID NO: 2243 - protein, 121 aa, synthetic construct
  source 1..121: note = CEA-A[CEACAM5]_H1.54
EVQLVESGGGLVQPGGSLRLSCAASGFTFTDYYMNWVRQAPGKGLEWVGFIGRKANAYTTEYSASVKGRFTISRDKSKSSLYLQMNSLKTEDTAVYYCTRDRGLRFYFDYWGQGTLVTVSS

SEQ ID NO: 2244 - protein, 121 aa, synthetic construct
  source 1..121: note = CEA-A[CEACAM5]_H1.55
EVQLVESGGGLVQPGGSLRLSCAASGFTFTDYYMNWVRQAPGKGLEWVGFIGSKANAYTTEYSASVKGRFTISRDKSKSSLYLQMNSLKTEDTAVYYCTRDRGLRFYFDYWGQGTLVTVSS

SEQ ID NO: 2245 - protein, 121 aa, synthetic construct
  source 1..121: note = CEA-A[CEACAM5]_H1.56
EVQLVESGGGLVQPGGSLRLSCAASGFTFTDYYMNWVRQAPGKGLEWVGFIGTKANAYTTEYSASVKGRFTISRDKSKSSLYLQMNSLKTEDTAVYYCTRDRGLRFYFDYWGQGTLVTVSS

SEQ ID NO: 2246 - protein, 121 aa, synthetic construct
  source 1..121: note = CEA-A[CEACAM5]_H1.57
EVQLVESGGGLVQPGGSLRLSCAASGFTFTDYYMNWVRQAPGKGLEWVGFIGYKANAYTTEYSASVKGRFTISRDKSKSSLYLQMNSLKTEDTAVYYCTRDRGLRFYFDYWGQGTLVTVSS

SEQ ID NO: 2247 - protein, 121 aa, synthetic construct
  source 1..121: note = CEA-A[CEACAM5]_H1.58
EVQLVESGGGLVQPGGSLRLSCAASGFTFTDYYMNWVRQAPGKGLEWVGFIGNKENAYTTEYSASVKGRFTISRDKSKSSLYLQMNSLKTEDTAVYYCTRDRGLRFYFDYWGQGTLVTVSS

SEQ ID NO: 2248 - protein, 121 aa, synthetic construct
  source 1..121: note = CEA-A[CEACAM5]_H1.59
EVQLVESGGGLVQPGGSLRLSCAASGFTFTDYYMNWVRQAPGKGLEWVGFIGNKGNAYTTEYSASVKGRFTISRDKSKSSLYLQMNSLKTEDTAVYYCTRDRGLRFYFDYWGQGTLVTVSS

SEQ ID NO: 2249 - protein, 121 aa, synthetic construct
  source 1..121: note = CEA-A[CEACAM5]_H1.60
EVQLVESGGGLVQPGGSLRLSCAASGFTFTDYYMNWVRQAPGKGLEWVGFIGNKKNAYTTEYSASVKGRFTISRDKSKSSLYLQMNSLKTEDTAVYYCTRDRGLRFYFDYWGQGTLVTVSS

SEQ ID NO: 2250 - protein, 121 aa, synthetic construct
  source 1..121: note = CEA-A[CEACAM5]_H1.61
EVQLVESGGGLVQPGGSLRLSCAASGFTFTDYYMNWVRQAPGKGLEWVGFIGNKLNAYTTEYSASVKGRFTISRDKSKSSLYLQMNSLKTEDTAVYYCTRDRGLRFYFDYWGQGTLVTVSS

SEQ ID NO: 2251 - protein, 121 aa, synthetic construct
  source 1..121: note = CEA-A[CEACAM5]_H1.62
EVQLVESGGGLVQPGGSLRLSCAASGFTFTDYYMNWVRQAPGKGLEWVGFIGNKQNAYTTEYSASVKGRFTISRDKSKSSLYLQMNSLKTEDTAVYYCTRDRGLRFYFDYWGQGTLVTVSS

SEQ ID NO: 2252 - protein, 121 aa, synthetic construct
  source 1..121: note = CEA-A[CEACAM5]_H1.63
EVQLVESGGGLVQPGGSLRLSCAASGFTFTDYYMNWVRQAPGKGLEWVGFIGNKVNAYTTEYSASVKGRFTISRDKSKSSLYLQMNSLKTEDTAVYYCTRDRGLRFYFDYWGQGTLVTVSS

SEQ ID NO: 2253 - protein, 121 aa, synthetic construct
  source 1..121: note = CEA-A[CEACAM5]_H1.64
EVQLVESGGGLVQPGGSLRLSCAASGFTFTDYYMNWVRQAPGKGLEWVGFIGNKAEAYTTEYSASVKGRFTISRDKSKSSLYLQMNSLKTEDTAVYYCTRDRGLRFYFDYWGQGTLVTVSS

SEQ ID NO: 2254 - protein, 121 aa, synthetic construct
  source 1..121: note = CEA-A[CEACAM5]_H1.65
EVQLVESGGGLVQPGGSLRLSCAASGFTFTDYYMNWVRQAPGKGLEWVGFIGNKAHAYTTEYSASVKGRFTISRDKSKSSLYLQMNSLKTEDTAVYYCTRDRGLRFYFDYWGQGTLVTVSS

SEQ ID NO: 2255 - protein, 121 aa, synthetic construct
  source 1..121: note = CEA-A[CEACAM5]_H1.66
EVQLVESGGGLVQPGGSLRLSCAASGFTFTDYYMNWVRQAPGKGLEWVGFIGNKAQAYTTEYSASVKGRFTISRDKSKSSLYLQMNSLKTEDTAVYYCTRDRGLRFYFDYWGQGTLVTVSS

SEQ ID NO: 2256 - protein, 121 aa, synthetic construct
  source 1..121: note = CEA-A[CEACAM5]_H1.67
EVQLVESGGGLVQPGGSLRLSCAASGFTFTDYYMNWVRQAPGKGLEWVGFIGNKARAYTTEYSASVKGRFTISRDKSKSSLYLQMNSLKTEDTAVYYCTRDRGLRFYFDYWGQGTLVTVSS

SEQ ID NO: 2257 - protein, 121 aa, synthetic construct
  source 1..121: note = CEA-A[CEACAM5]_H1.68
EVQLVESGGGLVQPGGSLRLSCAASGFTFTDYYMNWVRQAPGKGLEWVGFIGNKASAYTTEYSASVKGRFTISRDKSKSSLYLQMNSLKTEDTAVYYCTRDRGLRFYFDYWGQGTLVTVSS

SEQ ID NO: 2258 - protein, 121 aa, synthetic construct
  source 1..121: note = CEA-A[CEACAM5]_H1.69
EVQLVESGGGLVQPGGSLRLSCAASGFTFTDYYMNWVRQAPGKGLEWVGFIGNKATAYTTEYSASVKGRFTISRDKSKSSLYLQMNSLKTEDTAVYYCTRDRGLRFYFDYWGQGTLVTVSS

SEQ ID NO: 2259 - protein, 121 aa, synthetic construct
  source 1..121: note = CEA-A[CEACAM5]_H1.70
EVQLVESGGGLVQPGGSLRLSCAASGFTFTDYYMNWVRQAPGKGLEWVGFIGNKAYAYTTEYSASVKGRFTISRDKSKSSLYLQMNSLKTEDTAVYYCTRDRGLRFYFDYWGQGTLVTVSS

SEQ ID NO: 2260 - protein, 121 aa, synthetic construct
  source 1..121: note = CEA-A[CEACAM5]_H1.71
EVQLVESGGGLVQPGGSLRLSCAASGFTFTDYYMNWVRQAPGKGLEWVGFIGNKAAGYTTEYSASVKGRFTISRDKSKSSLYLQMNSLKTEDTAVYYCTRDRGLRFYFDYWGQGTLVTVSS

SEQ ID NO: 2261 - protein, 121 aa, synthetic construct
  source 1..121: note = CEA-A[CEACAM5]_H1.72
EVQLVESGGGLVQPGGSLRLSCAASGFTFTDYYMNWVRQAPGKGLEWVGFIGNKAEGYTTEYSASVKGRFTISRDKSKSSLYLQMNSLKTEDTAVYYCTRDRGLRFYFDYWGQGTLVTVSS

SEQ ID NO: 2262 - protein, 121 aa, synthetic construct
  source 1..121: note = CEA-A[CEACAM5]_H1.73
EVQLVESGGGLVQPGGSLRLSCAASGFTFTDYYMNWVRQAPGKGLEWVGFIGNKAQGYTTEYSASVKGRFTISRDKSKSSLYLQMNSLKTEDTAVYYCTRDRGLRFYFDYWGQGTLVTVSS

SEQ ID NO: 2263 - protein, 121 aa, synthetic construct
  source 1..121: note = CEA-A[CEACAM5]_H1.74
EVQLVESGGGLVQPGGSLRLSCAASGFTFTDYYMNWVRQAPGKGLEWVGFIGNKASGYTTEYSASVKGRFTISRDKSKSSLYLQMNSLKTEDTAVYYCTRDRGLRFYFDYWGQGTLVTVSS

SEQ ID NO: 2264 - protein, 121 aa, synthetic construct
  source 1..121: note = CEA-A[CEACAM5]_H1.75
EVQLVESGGGLVQPGGSLRLSCAASGFTFTDYYMNWVRQAPGKGLEWVGFIGNKANEYTTEYSASVKGRFTISRDKSKSSLYLQMNSLKTEDTAVYYCTRDRGLRFYFDYWGQGTLVTVSS

SEQ ID NO: 2265 - protein, 121 aa, synthetic construct
  source 1..121: note = CEA-A[CEACAM5]_H1.76
EVQLVESGGGLVQPGGSLRLSCAASGFTFTDYYMNWVRQAPGKGLEWVGFIGNKANHYTTEYSASVKGRFTISRDKSKSSLYLQMNSLKTEDTAVYYCTRDRGLRFYFDYWGQGTLVTVSS

SEQ ID NO: 2266 - protein, 121 aa, synthetic construct
  source 1..121: note = CEA-A[CEACAM5]_H1.77
EVQLVESGGGLVQPGGSLRLSCAASGFTFTDYYMNWVRQAPGKGLEWVGFIGNKANKYTTEYSASVKGRFTISRDKSKSSLYLQMNSLKTEDTAVYYCTRDRGLRFYFDYWGQGTLVTVSS

SEQ ID NO: 2267 - protein, 121 aa, synthetic construct
  source 1..121: note = CEA-A[CEACAM5]_H1.78
EVQLVESGGGLVQPGGSLRLSCAASGFTFTDYYMNWVRQAPGKGLEWVGFIGNKANLYTTEYSASVKGRFTISRDKSKSSLYLQMNSLKTEDTAVYYCTRDRGLRFYFDYWGQGTLVTVSS

SEQ ID NO: 2268 - protein, 121 aa, synthetic construct
  source 1..121: note = CEA-A[CEACAM5]_H1.79
EVQLVESGGGLVQPGGSLRLSCAASGFTFTDYYMNWVRQAPGKGLEWVGFIGNKANQYTTEYSASVKGRFTISRDKSKSSLYLQMNSLKTEDTAVYYCTRDRGLRFYFDYWGQGTLVTVSS

SEQ ID NO: 2269 - protein, 121 aa, synthetic construct
  source 1..121: note = CEA-A[CEACAM5]_H1.80
EVQLVESGGGLVQPGGSLRLSCAASGFTFTDYYMNWVRQAPGKGLEWVGFIGNKANTYTTEYSASVKGRFTISRDKSKSSLYLQMNSLKTEDTAVYYCTRDRGLRFYFDYWGQGTLVTVSS

SEQ ID NO: 2270 - protein, 121 aa, synthetic construct
  source 1..121: note = CEA-A[CEACAM5]_H1.81
EVQLVESGGGLVQPGGSLRLSCAASGFTFTDYYMNWVRQAPGKGLEWVGFIGNKANAATTEYSASVKGRFTISRDKSKSSLYLQMNSLKTEDTAVYYCTRDRGLRFYFDYWGQGTLVTVSS

SEQ ID NO: 2271 - protein, 121 aa, synthetic construct
  source 1..121: note = CEA-A[CEACAM5]_H1.82
EVQLVESGGGLVQPGGSLRLSCAASGFTFTDYYMNWVRQAPGKGLEWVGFIGNKANAFTTEYSASVKGRFTISRDKSKSSLYLQMNSLKTEDTAVYYCTRDRGLRFYFDYWGQGTLVTVSS

SEQ ID NO: 2272 - protein, 121 aa, synthetic construct
  source 1..121: note = CEA-A[CEACAM5]_H1.83
EVQLVESGGGLVQPGGSLRLSCAASGFTFTDYYMNWVRQAPGKGLEWVGFIGNKANAGTTEYSASVKGRFTISRDKSKSSLYLQMNSLKTEDTAVYYCTRDRGLRFYFDYWGQGTLVTVSS

SEQ ID NO: 2273 - protein, 121 aa, synthetic construct
  source 1..121: note = CEA-A[CEACAM5]_H1.84
EVQLVESGGGLVQPGGSLRLSCAASGFTFTDYYMNWVRQAPGKGLEWVGFIGNKANAHTTEYSASVKGRFTISRDKSKSSLYLQMNSLKTEDTAVYYCTRDRGLRFYFDYWGQGTLVTVSS

SEQ ID NO: 2274 - protein, 121 aa, synthetic construct
  source 1..121: note = CEA-A[CEACAM5]_H1.85
EVQLVESGGGLVQPGGSLRLSCAASGFTFTDYYMNWVRQAPGKGLEWVGFIGNKANALTTEYSASVKGRFTISRDKSKSSLYLQMNSLKTEDTAVYYCTRDRGLRFYFDYWGQGTLVTVSS

SEQ ID NO: 2275 - protein, 121 aa, synthetic construct
  source 1..121: note = CEA-A[CEACAM5]_H1.86
EVQLVESGGGLVQPGGSLRLSCAASGFTFTDYYMNWVRQAPGKGLEWVGFIGNKANASTTEYSASVKGRFTISRDKSKSSLYLQMNSLKTEDTAVYYCTRDRGLRFYFDYWGQGTLVTVSS

SEQ ID NO: 2276 - protein, 121 aa, synthetic construct
  source 1..121: note = CEA-A[CEACAM5]_H1.87
EVQLVESGGGLVQPGGSLRLSCAASGFTFTDYYMNWVRQAPGKGLEWVGFIGNKANAVTTEYSASVKGRFTISRDKSKSSLYLQMNSLKTEDTAVYYCTRDRGLRFYFDYWGQGTLVTVSS

SEQ ID NO: 2277 - protein, 121 aa, synthetic construct
  source 1..121: note = CEA-A[CEACAM5]_H1.88
EVQLVESGGGLVQPGGSLRLSCAASGFTFTDYYMNWVRQAPGKGLEWVGFIGNKANAYATEYSASVKGRFTISRDKSKSSLYLQMNSLKTEDTAVYYCTRDRGLRFYFDYWGQGTLVTVSS

SEQ ID NO: 2278 - protein, 121 aa, synthetic construct
  source 1..121: note = CEA-A[CEACAM5]_H1.89
EVQLVESGGGLVQPGGSLRLSCAASGFTFTDYYMNWVRQAPGKGLEWVGFIGNKANAYETEYSASVKGRFTISRDKSKSSLYLQMNSLKTEDTAVYYCTRDRGLRFYFDYWGQGTLVTVSS

SEQ ID NO: 2279 - protein, 121 aa, synthetic construct
  source 1..121: note = CEA-A[CEACAM5]_H1.90
EVQLVESGGGLVQPGGSLRLSCAASGFTFTDYYMNWVRQAPGKGLEWVGFIGNKANAYITEYSASVKGRFTISRDKSKSSLYLQMNSLKTEDTAVYYCTRDRGLRFYFDYWGQGTLVTVSS

SEQ ID NO: 2280 - protein, 121 aa, synthetic construct
  source 1..121: note = CEA-A[CEACAM5]_H1.91
EVQLVESGGGLVQPGGSLRLSCAASGFTFTDYYMNWVRQAPGKGLEWVGFIGNKANAYKTEYSASVKGRFTISRDKSKSSLYLQMNSLKTEDTAVYYCTRDRGLRFYFDYWGQGTLVTVSS

SEQ ID NO: 2281 - protein, 121 aa, synthetic construct
  source 1..121: note = CEA-A[CEACAM5]_H1.92
EVQLVESGGGLVQPGGSLRLSCAASGFTFTDYYMNWVRQAPGKGLEWVGFIGNKANAYQTEYSASVKGRFTISRDKSKSSLYLQMNSLKTEDTAVYYCTRDRGLRFYFDYWGQGTLVTVSS

SEQ ID NO: 2282 - protein, 121 aa, synthetic construct
  source 1..121: note = CEA-A[CEACAM5]_H1.93
EVQLVESGGGLVQPGGSLRLSCAASGFTFTDYYMNWVRQAPGKGLEWVGFIGNKANAYSTEYSASVKGRFTISRDKSKSSLYLQMNSLKTEDTAVYYCTRDRGLRFYFDYWGQGTLVTVSS

SEQ ID NO: 2283 - protein, 121 aa, synthetic construct
  source 1..121: note = CEA-A[CEACAM5]_H1.94
EVQLVESGGGLVQPGGSLRLSCAASGFTFTDYYMNWVRQAPGKGLEWVGFIGNKANAYVTEYSASVKGRFTISRDKSKSSLYLQMNSLKTEDTAVYYCTRDRGLRFYFDYWGQGTLVTVSS

SEQ ID NO: 2284 - protein, 121 aa, synthetic construct
  source 1..121: note = CEA-A[CEACAM5]_H1.95
EVQLVESGGGLVQPGGSLRLSCAASGFTFTDYYMNWVRQAPGKGLEWVGFIGNKANAYTTAYSASVKGRFTISRDKSKSSLYLQMNSLKTEDTAVYYCTRDRGLRFYFDYWGQGTLVTVSS

SEQ ID NO: 2285 - protein, 121 aa, synthetic construct
  source 1..121: note = CEA-A[CEACAM5]_H1.96
EVQLVESGGGLVQPGGSLRLSCAASGFTFTDYYMNWVRQAPGKGLEWVGFIGNKANAYTTDYSASVKGRFTISRDKSKSSLYLQMNSLKTEDTAVYYCTRDRGLRFYFDYWGQGTLVTVSS

SEQ ID NO: 2286 - protein, 121 aa, synthetic construct
  source 1..121: note = CEA-A[CEACAM5]_H1.97
EVQLVESGGGLVQPGGSLRLSCAASGFTFTDYYMNWVRQAPGKGLEWVGFIGNKANAYTTGYSASVKGRFTISRDKSKSSLYLQMNSLKTEDTAVYYCTRDRGLRFYFDYWGQGTLVTVSS

SEQ ID NO: 2287 - protein, 121 aa, synthetic construct
  source 1..121: note = CEA-A[CEACAM5]_H1.98
EVQLVESGGGLVQPGGSLRLSCAASGFTFTDYYMNWVRQAPGKGLEWVGFIGNKANAYTTHYSASVKGRFTISRDKSKSSLYLQMNSLKTEDTAVYYCTRDRGLRFYFDYWGQGTLVTVSS

SEQ ID NO: 2288 - protein, 121 aa, synthetic construct
  source 1..121: note = CEA-A[CEACAM5]_H1.99
EVQLVESGGGLVQPGGSLRLSCAASGFTFTDYYMNWVRQAPGKGLEWVGFIGNKANAYTTKYSASVKGRFTISRDKSKSSLYLQMNSLKTEDTAVYYCTRDRGLRFYFDYWGQGTLVTVSS

SEQ ID NO: 2289 - protein, 121 aa, synthetic construct
  source 1..121: note = CEA-A[CEACAM5]_H1.100
EVQLVESGGGLVQPGGSLRLSCAASGFTFTDYYMNWVRQAPGKGLEWVGFIGNKANAYTTQYSASVKGRFTISRDKSKSSLYLQMNSLKTEDTAVYYCTRDRGLRFYFDYWGQGTLVTVSS

SEQ ID NO: 2290 - protein, 121 aa, synthetic construct
  source 1..121: note = CEA-A[CEACAM5]_H1.101
EVQLVESGGGLVQPGGSLRLSCAASGFTFTDYYMNWVRQAPGKGLEWVGFIGNKANAYTTSYSASVKGRFTISRDKSKSSLYLQMNSLKTEDTAVYYCTRDRGLRFYFDYWGQGTLVTVSS

SEQ ID NO: 2291 - protein, 121 aa, synthetic construct
  source 1..121: note = CEA-A[CEACAM5]_H1.102
EVQLVESGGGLVQPGGSLRLSCAASGFTFTDYYMNWVRQAPGKGLEWVGFIGNKANAYTTEYSASVKGRFTISRDKSKSSLYLQMNSLKTEDTAVYYCTRERGLRFYFDYWGQGTLVTVSS

SEQ ID NO: 2292 - protein, 121 aa, synthetic construct
  source 1..121: note = CEA-A[CEACAM5]_H1.103
EVQLVESGGGLVQPGGSLRLSCAASGFTFTDYYMNWVRQAPGKGLEWVGFIGNKANAYTTEYSASVKGRFTISRDKSKSSLYLQMNSLKTEDTAVYYCTRGRGLRFYFDYWGQGTLVTVSS

SEQ ID NO: 2293 - protein, 121 aa, synthetic construct
  source 1..121: note = CEA-A[CEACAM5]_H1.104
EVQLVESGGGLVQPGGSLRLSCAASGFTFTDYYMNWVRQAPGKGLEWVGFIGNKANAYTTEYSASVKGRFTISRDKSKSSLYLQMNSLKTEDTAVYYCTRHRGLRFYFDYWGQGTLVTVSS

SEQ ID NO: 2294 - protein, 121 aa, synthetic construct
  source 1..121: note = CEA-A[CEACAM5]_H1.105
EVQLVESGGGLVQPGGSLRLSCAASGFTFTDYYMNWVRQAPGKGLEWVGFIGNKANAYTTEYSASVKGRFTISRDKSKSSLYLQMNSLKTEDTAVYYCTRNRGLRFYFDYWGQGTLVTVSS

SEQ ID NO: 2295 - protein, 121 aa, synthetic construct
  source 1..121: note = CEA-A[CEACAM5]_H1.106
EVQLVESGGGLVQPGGSLRLSCAASGFTFTDYYMNWVRQAPGKGLEWVGFIGNKANAYTTEYSASVKGRFTISRDKSKSSLYLQMNSLKTEDTAVYYCTRRRGLRFYFDYWGQGTLVTVSS

SEQ ID NO: 2296 - protein, 121 aa, synthetic construct
  source 1..121: note = CEA-A[CEACAM5]_H1.107
EVQLVESGGGLVQPGGSLRLSCAASGFTFTDYYMNWVRQAPGKGLEWVGFIGNKANAYTTEYSASVKGRFTISRDKSKSSLYLQMNSLKTEDTAVYYCTRSRGLRFYFDYWGQGTLVTVSS

SEQ ID NO: 2297 - protein, 121 aa, synthetic construct
  source 1..121: note = CEA-A[CEACAM5]_H1.108
EVQLVESGGGLVQPGGSLRLSCAASGFTFTDYYMNWVRQAPGKGLEWVGFIGNKANAYTTEYSASVKGRFTISRDKSKSSLYLQMNSLKTEDTAVYYCTRTRGLRFYFDYWGQGTLVTVSS

SEQ ID NO: 2298 - protein, 121 aa, synthetic construct
  source 1..121: note = CEA-A[CEACAM5]_H1.109
EVQLVESGGGLVQPGGSLRLSCAASGFTFTDYYMNWVRQAPGKGLEWVGFIGNKANAYTTEYSASVKGRFTISRDKSKSSLYLQMNSLKTEDTAVYYCTRDDGLRFYFDYWGQGTLVTVSS

SEQ ID NO: 2299 - protein, 121 aa, synthetic construct
  source 1..121: note = CEA-A[CEACAM5]_H1.110
EVQLVESGGGLVQPGGSLRLSCAASGFTFTDYYMNWVRQAPGKGLEWVGFIGNKANAYTTEYSASVKGRFTISRDKSKSSLYLQMNSLKTEDTAVYYCTRDGGLRFYFDYWGQGTLVTVSS

SEQ ID NO: 2300 - protein, 121 aa, synthetic construct
  source 1..121: note = CEA-A[CEACAM5]_H1.111
EVQLVESGGGLVQPGGSLRLSCAASGFTFTDYYMNWVRQAPGKGLEWVGFIGNKANAYTTEYSASVKGRFTISRDKSKSSLYLQMNSLKTEDTAVYYCTRDHGLRFYFDYWGQGTLVTVSS

SEQ ID NO: 2301 - protein, 121 aa, synthetic construct
  source 1..121: note = CEA-A[CEACAM5]_H1.112
EVQLVESGGGLVQPGGSLRLSCAASGFTFTDYYMNWVRQAPGKGLEWVGFIGNKANAYTTEYSASVKGRFTISRDKSKSSLYLQMNSLKTEDTAVYYCTRDKGLRFYFDYWGQGTLVTVSS

SEQ ID NO: 2302 - protein, 121 aa, synthetic construct
  source 1..121: note = CEA-A[CEACAM5]_H1.113
EVQLVESGGGLVQPGGSLRLSCAASGFTFTDYYMNWVRQAPGKGLEWVGFIGNKANAYTTEYSASVKGRFTISRDKSKSSLYLQMNSLKTEDTAVYYCTRDQGLRFYFDYWGQGTLVTVSS

SEQ ID NO: 2303 - protein, 121 aa, synthetic construct
  source 1..121: note = CEA-A[CEACAM5]_H1.114
EVQLVESGGGLVQPGGSLRLSCAASGFTFTDYYMNWVRQAPGKGLEWVGFIGNKANAYTTEYSASVKGRFTISRDKSKSSLYLQMNSLKTEDTAVYYCTRDSGLRFYFDYWGQGTLVTVSS

SEQ ID NO: 2304 - protein, 121 aa, synthetic construct
  source 1..121: note = CEA-A[CEACAM5]_H1.115
EVQLVESGGGLVQPGGSLRLSCAASGFTFTDYYMNWVRQAPGKGLEWVGFIGNKANAYTTEYSASVKGRFTISRDKSKSSLYLQMNSLKTEDTAVYYCTRDYGLRFYFDYWGQGTLVTVSS

SEQ ID NO: 2305 - protein, 121 aa, synthetic construct
  source 1..121: note = CEA-A[CEACAM5]_H1.116
EVQLVESGGGLVQPGGSLRLSCAASGFTFTDYYMNWVRQAPGKGLEWVGFIGNKANAYTTEYSASVKGRFTISRDKSKSSLYLQMNSLKTEDTAVYYCTRDRALRFYFDYWGQGTLVTVSS

SEQ ID NO: 2306 - protein, 121 aa, synthetic construct
  source 1..121: note = CEA-A[CEACAM5]_H1.117
EVQLVESGGGLVQPGGSLRLSCAASGFTFTDYYMNWVRQAPGKGLEWVGFIGNKANAYTTEYSASVKGRFTISRDKSKSSLYLQMNSLKTEDTAVYYCTRDRDLRFYFDYWGQGTLVTVSS

SEQ ID NO: 2307 - protein, 121 aa, synthetic construct
  source 1..121: note = CEA-A[CEACAM5]_H1.118
EVQLVESGGGLVQPGGSLRLSCAASGFTFTDYYMNWVRQAPGKGLEWVGFIGNKANAYTTEYSASVKGRFTISRDKSKSSLYLQMNSLKTEDTAVYYCTRDRHLRFYFDYWGQGTLVTVSS

SEQ ID NO: 2308 - protein, 121 aa, synthetic construct
  source 1..121: note = CEA-A[CEACAM5]_H1.119
EVQLVESGGGLVQPGGSLRLSCAASGFTFTDYYMNWVRQAPGKGLEWVGFIGNKANAYTTEYSASVKGRFTISRDKSKSSLYLQMNSLKTEDTAVYYCTRDRKLRFYFDYWGQGTLVTVSS

SEQ ID NO: 2309 - protein, 121 aa, synthetic construct
  source 1..121: note = CEA-A[CEACAM5]_H1.120
EVQLVESGGGLVQPGGSLRLSCAASGFTFTDYYMNWVRQAPGKGLEWVGFIGNKANAYTTEYSASVKGRFTISRDKSKSSLYLQMNSLKTEDTAVYYCTRDRQLRFYFDYWGQGTLVTVSS

SEQ ID NO: 2310 - protein, 121 aa, synthetic construct
  source 1..121: note = CEA-A[CEACAM5]_H1.121
EVQLVESGGGLVQPGGSLRLSCAASGFTFTDYYMNWVRQAPGKGLEWVGFIGNKANAYTTEYSASVKGRFTISRDKSKSSLYLQMNSLKTEDTAVYYCTRDRSLRFYFDYWGQGTLVTVSS

SEQ ID NO: 2311 - protein, 121 aa, synthetic construct
  source 1..121: note = CEA-A[CEACAM5]_H1.122
EVQLVESGGGLVQPGGSLRLSCAASGFTFTDYYMNWVRQAPGKGLEWVGFIGNKANAYTTEYSASVKGRFTISRDKSKSSLYLQMNSLKTEDTAVYYCTRDRTLRFYFDYWGQGTLVTVSS

SEQ ID NO: 2312 - protein, 121 aa, synthetic construct
  source 1..121: note = CEA-A[CEACAM5]_H1.123
EVQLVESGGGLVQPGGSLRLSCAASGFTFTDYYMNWVRQAPGKGLEWVGFIGNKANAYTTEYSASVKGRFTISRDKSKSSLYLQMNSLKTEDTAVYYCTRDRGARFYFDYWGQGTLVTVSS

SEQ ID NO: 2313 - protein, 121 aa, synthetic construct
  source 1..121: note = CEA-A[CEACAM5]_H1.124
EVQLVESGGGLVQPGGSLRLSCAASGFTFTDYYMNWVRQAPGKGLEWVGFIGNKANAYTTEYSASVKGRFTISRDKSKSSLYLQMNSLKTEDTAVYYCTRDRGERFYFDYWGQGTLVTVSS

SEQ ID NO: 2314 - protein, 121 aa, synthetic construct
  source 1..121: note = CEA-A[CEACAM5]_H1.125
EVQLVESGGGLVQPGGSLRLSCAASGFTFTDYYMNWVRQAPGKGLEWVGFIGNKANAYTTEYSASVKGRFTISRDKSKSSLYLQMNSLKTEDTAVYYCTRDRGFRFYFDYWGQGTLVTVSS

SEQ ID NO: 2315 - protein, 121 aa, synthetic construct
  source 1..121: note = CEA-A[CEACAM5]_H1.126
EVQLVESGGGLVQPGGSLRLSCAASGFTFTDYYMNWVRQAPGKGLEWVGFIGNKANAYTTEYSASVKGRFTISRDKSKSSLYLQMNSLKTEDTAVYYCTRDRGIRFYFDYWGQGTLVTVSS

SEQ ID NO: 2316 - protein, 121 aa, synthetic construct
  source 1..121: note = CEA-A[CEACAM5]_H1.127
EVQLVESGGGLVQPGGSLRLSCAASGFTFTDYYMNWVRQAPGKGLEWVGFIGNKANAYTTEYSASVKGRFTISRDKSKSSLYLQMNSLKTEDTAVYYCTRDRGKRFYFDYWGQGTLVTVSS

SEQ ID NO: 2317 - protein, 121 aa, synthetic construct
  source 1..121: note = CEA-A[CEACAM5]_H1.128
EVQLVESGGGLVQPGGSLRLSCAASGFTFTDYYMNWVRQAPGKGLEWVGFIGNKANAYTTEYSASVKGRFTISRDKSKSSLYLQMNSLKTEDTAVYYCTRDRGVRFYFDYWGQGTLVTVSS

SEQ ID NO: 2318 - protein, 121 aa, synthetic construct
  source 1..121: note = CEA-A[CEACAM5]_H1.129
EVQLVESGGGLVQPGGSLRLSCAASGFTFTDYYMNWVRQAPGKGLEWVGFIGNKANAYTTEYSASVKGRFTISRDKSKSSLYLQMNSLKTEDTAVYYCTRDRGYRFYFDYWGQGTLVTVSS

SEQ ID NO: 2319 - protein, 121 aa, synthetic construct
  source 1..121: note = CEA-A[CEACAM5]_H1.130
EVQLVESGGGLVQPGGSLRLSCAASGFTFTDYYMNWVRQAPGKGLEWVGFIGNKANAYTTEYSASVKGRFTISRDKSKSSLYLQMNSLKTEDTAVYYCTRDRGLDFYFDYWGQGTLVTVSS

SEQ ID NO: 2320 - protein, 121 aa, synthetic construct
  source 1..121: note = CEA-A[CEACAM5]_H1.131
EVQLVESGGGLVQPGGSLRLSCAASGFTFTDYYMNWVRQAPGKGLEWVGFIGNKANAYTTEYSASVKGRFTISRDKSKSSLYLQMNSLKTEDTAVYYCTRDRGLGFYFDYWGQGTLVTVSS

SEQ ID NO: 2321 - protein, 121 aa, synthetic construct
  source 1..121: note = CEA-A[CEACAM5]_H1.132
EVQLVESGGGLVQPGGSLRLSCAASGFTFTDYYMNWVRQAPGKGLEWVGFIGNKANAYTTEYSASVKGRFTISRDKSKSSLYLQMNSLKTEDTAVYYCTRDRGLHFYFDYWGQGTLVTVSS

SEQ ID NO: 2322 - protein, 121 aa, synthetic construct
  source 1..121: note = CEA-A[CEACAM5]_H1.133
EVQLVESGGGLVQPGGSLRLSCAASGFTFTDYYMNWVRQAPGKGLEWVGFIGNKANAYTTEYSASVKGRFTISRDKSKSSLYLQMNSLKTEDTAVYYCTRDRGLKFYFDYWGQGTLVTVSS

SEQ ID NO: 2323 - protein, 121 aa, synthetic construct
  source 1..121: note = CEA-A[CEACAM5]_H1.134
EVQLVESGGGLVQPGGSLRLSCAASGFTFTDYYMNWVRQAPGKGLEWVGFIGNKANAYTTEYSASVKGRFTISRDKSKSSLYLQMNSLKTEDTAVYYCTRDRGLQFYFDYWGQGTLVTVSS

SEQ ID NO: 2324 - protein, 121 aa, synthetic construct
  source 1..121: note = CEA-A[CEACAM5]_H1.135
EVQLVESGGGLVQPGGSLRLSCAASGFTFTDYYMNWVRQAPGKGLEWVGFIGNKANAYTTEYSASVKGRFTISRDKSKSSLYLQMNSLKTEDTAVYYCTRDRGLSFYFDYWGQGTLVTVSS

SEQ ID NO: 2325 - protein, 121 aa, synthetic construct
  source 1..121: note = CEA-A[CEACAM5]_H1.136
EVQLVESGGGLVQPGGSLRLSCAASGFTFTDYYMNWVRQAPGKGLEWVGFIGNKANAYTTEYSASVKGRFTISRDKSKSSLYLQMNSLKTEDTAVYYCTRDRGLYFYFDYWGQGTLVTVSS

SEQ ID NO: 2326 - protein, 121 aa, synthetic construct
  source 1..121: note = CEA-A[CEACAM5]_H1.137
EVQLVESGGGLVQPGGSLRLSCAASGFTFTDYYMNWVRQAPGKGLEWVGFIGNKANAYTTEYSASVKGRFTISRDKSKSSLYLQMNSLKTEDTAVYYCTRDRGLRDYFDYWGQGTLVTVSS

SEQ ID NO: 2327 - protein, 121 aa, synthetic construct
  source 1..121: note = CEA-A[CEACAM5]_H1.138
EVQLVESGGGLVQPGGSLRLSCAASGFTFTDYYMNWVRQAPGKGLEWVGFIGNKANAYTTEYSASVKGRFTISRDKSKSSLYLQMNSLKTEDTAVYYCTRDRGLRHYFDYWGQGTLVTVSS

SEQ ID NO: 2328 - protein, 121 aa, synthetic construct
  source 1..121: note = CEA-A[CEACAM5]_H1.139
EVQLVESGGGLVQPGGSLRLSCAASGFTFTDYYMNWVRQAPGKGLEWVGFIGNKANAYTTEYSASVKGRFTISRDKSKSSLYLQMNSLKTEDTAVYYCTRDRGLRIYFDYWGQGTLVTVSS

SEQ ID NO: 2329 - protein, 121 aa, synthetic construct
  source 1..121: note = CEA-A[CEACAM5]_H1.140
EVQLVESGGGLVQPGGSLRLSCAASGFTFTDYYMNWVRQAPGKGLEWVGFIGNKANAYTTEYSASVKGRFTISRDKSKSSLYLQMNSLKTEDTAVYYCTRDRGLRKYFDYWGQGTLVTVSS

SEQ ID NO: 2330 - protein, 121 aa, synthetic construct
  source 1..121: note = CEA-A[CEACAM5]_H1.141
EVQLVESGGGLVQPGGSLRLSCAASGFTFTDYYMNWVRQAPGKGLEWVGFIGNKANAYTTEYSASVKGRFTISRDKSKSSLYLQMNSLKTEDTAVYYCTRDRGLRLYFDYWGQGTLVTVSS

SEQ ID NO: 2331 - protein, 121 aa, synthetic construct
  source 1..121: note = CEA-A[CEACAM5]_H1.142
EVQLVESGGGLVQPGGSLRLSCAASGFTFTDYYMNWVRQAPGKGLEWVGFIGNKANAYTTEYSASVKGRFTISRDKSKSSLYLQMNSLKTEDTAVYYCTRDRGLRSYFDYWGQGTLVTVSS

SEQ ID NO: 2332 - protein, 121 aa, synthetic construct
  source 1..121: note = CEA-A[CEACAM5]_H1.143
EVQLVESGGGLVQPGGSLRLSCAASGFTFTDYYMNWVRQAPGKGLEWVGFIGNKANAYTTEYSASVKGRFTISRDKSKSSLYLQMNSLKTEDTAVYYCTRDRGLRYYFDYWGQGTLVTVSS

SEQ ID NO: 2333 - protein, 121 aa, synthetic construct
  source 1..121: note = CEA-A[CEACAM5]_H1.144
EVQLVESGGGLVQPGGSLRLSCAASGFTFTDYYMNWVRQAPGKGLEWVGFIGNKANAYTTEYSASVKGRFTISRDKSKSSLYLQMNSLKTEDTAVYYCTRDRGLRFAFDYWGQGTLVTVSS

SEQ ID NO: 2334 - protein, 121 aa, synthetic construct
  source 1..121: note = CEA-A[CEACAM5]_H1.145
EVQLVESGGGLVQPGGSLRLSCAASGFTFTDYYMNWVRQAPGKGLEWVGFIGNKANAYTTEYSASVKGRFTISRDKSKSSLYLQMNSLKTEDTAVYYCTRDRGLRFDFDYWGQGTLVTVSS

SEQ ID NO: 2335 - protein, 121 aa, synthetic construct
  source 1..121: note = CEA-A[CEACAM5]_H1.146
EVQLVESGGGLVQPGGSLRLSCAASGFTFTDYYMNWVRQAPGKGLEWVGFIGNKANAYTTEYSASVKGRFTISRDKSKSSLYLQMNSLKTEDTAVYYCTRDRGLRFFFDYWGQGTLVTVSS

SEQ ID NO: 2336 - protein, 121 aa, synthetic construct
  source 1..121: note = CEA-A[CEACAM5]_H1.147
EVQLVESGGGLVQPGGSLRLSCAASGFTFTDYYMNWVRQAPGKGLEWVGFIGNKANAYTTEYSASVKGRFTISRDKSKSSLYLQMNSLKTEDTAVYYCTRDRGLRFHFDYWGQGTLVTVSS

SEQ ID NO: 2337 - protein, 121 aa, synthetic construct
  source 1..121: note = CEA-A[CEACAM5]_H1.148
EVQLVESGGGLVQPGGSLRLSCAASGFTFTDYYMNWVRQAPGKGLEWVGFIGNKANAYTTEYSASVKGRFTISRDKSKSSLYLQMNSLKTEDTAVYYCTRDRGLRFKFDYWGQGTLVTVSS

SEQ ID NO: 2338 - protein, 121 aa, synthetic construct
  source 1..121: note = CEA-A[CEACAM5]_H1.149
EVQLVESGGGLVQPGGSLRLSCAASGFTFTDYYMNWVRQAPGKGLEWVGFIGNKANAYTTEYSASVKGRFTISRDKSKSSLYLQMNSLKTEDTAVYYCTRDRGLRFLFDYWGQGTLVTVSS

SEQ ID NO: 2339 - protein, 121 aa, synthetic construct
  source 1..121: note = CEA-A[CEACAM5]_H1.150
EVQLVESGGGLVQPGGSLRLSCAASGFTFTDYYMNWVRQAPGKGLEWVGFIGNKANAYTTEYSASVKGRFTISRDKSKSSLYLQMNSLKTEDTAVYYCTRDRGLRFVFDYWGQGTLVTVSS

SEQ ID NO: 2340 - protein, 106 aa, synthetic construct
  source 1..106: note = CEA-A[CEACAM5]_L1.1
QTVLTQSPATLSLSPGERATLSCRASSSVTYIHWYQQKPGSSPRSLIYATSNLASGVPARFSGSGSGTDYTLTISSLEPEDFAVYYCQHWSSKPPTFGGGTKVEIK

SEQ ID NO: 2341 - protein, 106 aa, synthetic construct
  source 1..106: note = CEA-A[CEACAM5]_L1.2
QTVLTQSPATLSLSPGERATLSCRASSSVTYIHWYQQKPGQSPKSLIYATSNLASGVPARFSGSGSGTDYTLTISSLEPEDFAVYYCQHWSSKPPTFGGGTKVEIK

SEQ ID NO: 2342 - protein, 106 aa, synthetic construct
  source 1..106: note = CEA-A[CEACAM5]_L1.3
QTVLTQSPATLSLSPGERATLSCRASSSVTYIHWYQQKPGQSPRSWIYATSNLASGVPARFSGSGSGTDYTLTISSLEPEDFAVYYCQHWSSKPPTFGGGTKVEIK

SEQ ID NO: 2343 - protein, 106 aa, synthetic construct
  source 1..106: note = CEA-A[CEACAM5]_L1.4
QTVLTQSPATLSLSPGERATLSCRASSSVTYIHWYQQKPGSSPKSLIYATSNLASGVPARFSGSGSGTDYTLTISSLEPEDFAVYYCQHWSSKPPTFGGGTKVEIK

SEQ ID NO: 2344 - protein, 106 aa, synthetic construct
  source 1..106: note = CEA-A[CEACAM5]_L1.5
QTVLTQSPATLSLSPGERATLSCRASSSVTYIHWYQQKPGQSPKSWIYATSNLASGVPARFSGSGSGTDYTLTISSLEPEDFAVYYCQHWSSKPPTFGGGTKVEIK

SEQ ID NO: 2345 - protein, 106 aa, synthetic construct
  source 1..106: note = CEA-A[CEACAM5]_L1.6
QTVLTQSPATLSLSPGERATLSCRASSSVTYIHWYQQKPGSSPKSWIYATSNLASGVPARFSGSGSGTDYTLTISSLEPEDFAVYYCQHWSSKPPTFGGGTKVEIK

SEQ ID NO: 2346 - protein, 106 aa, synthetic construct
  source 1..106: note = CEA-A[CEACAM5]_L1.7
QTVLTQSPATLSLSPGERATLSCRASSSVTYIHWYQQKPGQSPRSLIYATSNLASGVPARFSGSGSGTSYSLTISSLEPEDFAVYYCQHWSSKPPTFGGGTKVEIK

SEQ ID NO: 2347 - protein, 106 aa, synthetic construct
  source 1..106: note = CEA-A[CEACAM5]_L1.8
QTVLTQSPATLSLSPGERATLSCRASSSVTYIHWYQQKPGQSPRSLIYATSNLASGVPARFSGSGSGTDYTLTISSLEPEDFAVYYCQHFSSKPPTFGGGTKVEIK

SEQ ID NO: 2348 - protein, 106 aa, synthetic construct
  source 1..106: note = CEA-A[CEACAM5]_L1.9
QTVLTQSPATLSLSPGERATLSCRASSSVTYIHWYQQKPGQSPRSLIYATSNLASGVPARFSGSGSGTDYTLTISSLEPEDFAVYYCQHYSSKPPTFGGGTKVEIK

SEQ ID NO: 2349 - protein, 106 aa, synthetic construct
  source 1..106: note = CEA-A[CEACAM5]_L2.1
QTVLTQSPATLSLSPGERATLSCRASSSVTYIHWYQQKPGQAPRLLIYATSNLASGIPARFSGSGSGTDFTLTISSLEPEDFAVYYCQHWSSKPPTFGGGTKVEIK

SEQ ID NO: 2350 - protein, 106 aa, synthetic construct
  source 1..106: note = CEA-A[CEACAM5]_L2.2
EIVLTQSPATLSLSPGERATLSCRASSSVTYIHWYQQKPGQAPRLLIYATSNLASGVPARFSGSGSGTDFTLTISSLEPEDFAVYYCQHWSSKPPTFGGGTKVEIK

SEQ ID NO: 2351 - protein, 106 aa, synthetic construct
  source 1..106: note = CEA-A[CEACAM5]_L2.3
EIVLTQSPATLSLSPGERATLSCRASSSVTYIHWYQQKPGQAPRLLIYATSNLASGIPARFSGSGSGTDYTLTISSLEPEDFAVYYCQHWSSKPPTFGGGTKVEIK

SEQ ID NO: 2352 - protein, 106 aa, synthetic construct
  source 1..106: note = CEA-A[CEACAM5]_L2.4
EIVLTQSPATLSLSPGERATLSCRASSSVTYIHWYQQKPGQSPRLLIYATSNLASGIPARFSGSGSGTDFTLTISSLEPEDFAVYYCQHWSSKPPTFGGGTKVEIK

SEQ ID NO: 2353 - protein, 106 aa, synthetic construct
  source 1..106: note = CEA-A[CEACAM5]_L2.5
EIVLTQSPATLSLSPGERATLSCRASSSVTYIHWYQQKPGQAPRSLIYATSNLASGIPARFSGSGSGTDFTLTISSLEPEDFAVYYCQHWSSKPPTFGGGTKVEIK

SEQ ID NO: 2354 - protein, 106 aa, synthetic construct
  source 1..106: note = CEA-A[CEACAM5]_L2.6
EIVLTQSPATLSLSPGERATLSCRASSSVTYIHWYQQKPGQSPRSLIYATSNLASGIPARFSGSGSGTDFTLTISSLEPEDFAVYYCQHWSSKPPTFGGGTKVEIK

SEQ ID NO: 2355 - protein, 106 aa, synthetic construct
  source 1..106: note = CEA-A[CEACAM5]_L2.7
EIVLTQSPATLSLSPGERATLSCRASSSVTYIHWYQQKPGQAPRLWIYATSNLASGIPARFSGSGSGTDFTLTISSLEPEDFAVYYCQHWSSKPPTFGGGTKVEIK

SEQ ID NO: 2356 - protein, 106 aa, synthetic construct
  source 1..106: note = CEA-A[CEACAM5]_L2.8
EIVLTQSPATLSLSPGERATLSCRASSSVTYIHWYQQKPGQAPRSWIYATSNLASGIPARFSGSGSGTDFTLTISSLEPEDFAVYYCQHWSSKPPTFGGGTKVEIK

SEQ ID NO: 2357 - protein, 106 aa, synthetic construct
  source 1..106: note = CEA-A[CEACAM5]_L2.9
EIVLTQSPATLSLSPGERATLSCRASSSVTYIHWYQQKPGQAPKSWIYATSNLASGIPARFSGSGSGTDFTLTISSLEPEDFAVYYCQHWSSKPPTFGGGTKVEIK

SEQ ID NO: 2358 - protein, 106 aa, synthetic construct
  source 1..106: note = CEA-A[CEACAM5]_L2.10
EIVLTQSPATLSLSPGERATLSCRASSSVTYIHWYQQKPGQSPRSWIYATSNLASGIPARFSGSGSGTDFTLTISSLEPEDFAVYYCQHWSSKPPTFGGGTKVEIK

SEQ ID NO: 2359 - protein, 106 aa, synthetic construct
  source 1..106: note = CEA-A[CEACAM5]_L2.11
EIVLTQSPATLSLSPGERATLSCRASSSVTYIHWYQQKPGQSPKSWIYATSNLASGIPARFSGSGSGTDFTLTISSLEPEDFAVYYCQHWSSKPPTFGGGTKVEIK

SEQ ID NO: 2360 - protein, 106 aa, synthetic construct
  source 1..106: note = CEA-A[CEACAM5]_L2.12
EIVLTQSPATLSLSPGERATLSCRASSSVTYIHWYQQKPGSSPKSWIYATSNLASGIPARFSGSGSGTDFTLTISSLEPEDFAVYYCQHWSSKPPTFGGGTKVEIK

SEQ ID NO: 2361 - protein, 106 aa, synthetic construct
  source 1..106: note = CEA-A[CEACAM5]_L2.13
EIVLTQSPATLSLSPGERATLSCRASSSVTYIHWYQQKPGQAPRSWIYATSNLASGIPARFSGSGSGTDFTLTISSLEPEDFAVYYCQHFSSKPPTFGGGTKVEIK

SEQ ID NO: 2362 - protein, 106 aa, synthetic construct
  source 1..106: note = CEA-A[CEACAM5]_L2.14
EIVLTQSPATLSLSPGERATLSCRASSSVTYIHWYQQKPGQAPRSWIYATSNLASGIPARFSGSGSGTDFTLTISSLEPEDFAVYYCQHYSSKPPTFGGGTKVEIK

SEQ ID NO: 2363 - protein, 106 aa, synthetic construct; identical to SEQ ID NO: 2186
  source 1..106: note = CEA-A[CEACAM5]_L2.15

SEQ ID NO: 2364 - protein, 106 aa, synthetic construct
  source 1..106: note = CEA-A[CEACAM5]_L2.16
EIVLTQSPATLSLSPGERATLSCRASASVTYIHWYQQKPGQAPKSLIYATSNLASGIPARFSGSGSGTDFTLTISSLEPEDFAVYYCQHWSSKPPTFGGGTKVEIK

SEQ ID NO: 2365 - protein, 106 aa, synthetic construct
  source 1..106: note = CEA-A[CEACAM5]_L2.17
EIVLTQSPATLSLSPGERATLSCRASESVTYIHWYQQKPGQAPKSLIYATSNLASGIPARFSGSGSGTDFTLTISSLEPEDFAVYYCQHWSSKPPTFGGGTKVEIK

SEQ ID NO: 2366 - protein, 106 aa, synthetic construct
  source 1..106: note = CEA-A[CEACAM5]_L2.18
EIVLTQSPATLSLSPGERATLSCRASGSVTYIHWYQQKPGQAPKSLIYATSNLASGIPARFSGSGSGTDFTLTISSLEPEDFAVYYCQHWSSKPPTFGGGTKVEIK

SEQ ID NO: 2367 - protein, 106 aa, synthetic construct
  source 1..106: note = CEA-A[CEACAM5]_L2.19
EIVLTQSPATLSLSPGERATLSCRASKSVTYIHWYQQKPGQAPKSLIYATSNLASGIPARFSGSGSGTDFTLTISSLEPEDFAVYYCQHWSSKPPTFGGGTKVEIK

SEQ ID NO: 2368 - protein, 106 aa, synthetic construct
  source 1..106: note = CEA-A[CEACAM5]_L2.20
EIVLTQSPATLSLSPGERATLSCRASQSVTYIHWYQQKPGQAPKSLIYATSNLASGIPARFSGSGSGTDFTLTISSLEPEDFAVYYCQHWSSKPPTFGGGTKVEIK

SEQ ID NO: 2369 - protein, 106 aa, synthetic construct
  source 1..106: note = CEA-A[CEACAM5]_L2.21
EIVLTQSPATLSLSPGERATLSCRASTSVTYIHWYQQKPGQAPKSLIYATSNLASGIPARFSGSGSGTDFTLTISSLEPEDFAVYYCQHWSSKPPTFGGGTKVEIK

SEQ ID NO: 2370 - protein, 106 aa, synthetic construct
  source 1..106: note = CEA-A[CEACAM5]_L2.22
EIVLTQSPATLSLSPGERATLSCRASVSVTYIHWYQQKPGQAPKSLIYATSNLASGIPARFSGSGSGTDFTLTISSLEPEDFAVYYCQHWSSKPPTFGGGTKVEIK

SEQ ID NO: 2371 - protein, 106 aa, synthetic construct
  source 1..106: note = CEA-A[CEACAM5]_L2.23
EIVLTQSPATLSLSPGERATLSCRASSAVTYIHWYQQKPGQAPKSLIYATSNLASGIPARFSGSGSGTDFTLTISSLEPEDFAVYYCQHWSSKPPTFGGGTKVEIK

SEQ ID NO: 2372 - protein, 106 aa, synthetic construct
  source 1..106: note = CEA-A[CEACAM5]_L2.24
EIVLTQSPATLSLSPGERATLSCRASSDVTYIHWYQQKPGQAPKSLIYATSNLASGIPARFSGSGSGTDFTLTISSLEPEDFAVYYCQHWSSKPPTFGGGTKVEIK

SEQ ID NO: 2373 - protein, 106 aa, synthetic construct
  source 1..106: note = CEA-A[CEACAM5]_L2.25
EIVLTQSPATLSLSPGERATLSCRASSGVTYIHWYQQKPGQAPKSLIYATSNLASGIPARFSGSGSGTDFTLTISSLEPEDFAVYYCQHWSSKPPTFGGGTKVEIK

SEQ ID NO: 2374 - protein, 106 aa, synthetic construct
  source 1..106: note = CEA-A[CEACAM5]_L2.26
EIVLTQSPATLSLSPGERATLSCRASSKVTYIHWYQQKPGQAPKSLIYATSNLASGIPARFSGSGSGTDFTLTISSLEPEDFAVYYCQHWSSKPPTFGGGTKVEIK

SEQ ID NO: 2375 - protein, 106 aa, synthetic construct
  source 1..106: note = CEA-A[CEACAM5]_L2.27
EIVLTQSPATLSLSPGERATLSCRASSQVTYIHWYQQKPGQAPKSLIYATSNLASGIPARFSGSGSGTDFTLTISSLEPEDFAVYYCQHWSSKPPTFGGGTKVEIK

SEQ ID NO: 2376 - protein, 106 aa, synthetic construct
  source 1..106: note = CEA-A[CEACAM5]_L2.28
EIVLTQSPATLSLSPGERATLSCRASSTVTYIHWYQQKPGQAPKSLIYATSNLASGIPARFSGSGSGTDFTLTISSLEPEDFAVYYCQHWSSKPPTFGGGTKVEIK

SEQ ID NO: 2377 - protein, 106 aa, synthetic construct
  source 1..106: note = CEA-A[CEACAM5]_L2.29
EIVLTQSPATLSLSPGERATLSCRASSVVTYIHWYQQKPGQAPKSLIYATSNLASGIPARFSGSGSGTDFTLTISSLEPEDFAVYYCQHWSSKPPTFGGGTKVEIK

SEQ ID NO: 2378 - protein, 106 aa, synthetic construct
  source 1..106: note = CEA-A[CEACAM5]_L2.30
EIVLTQSPATLSLSPGERATLSCRASSSATYIHWYQQKPGQAPKSLIYATSNLASGIPARFSGSGSGTDFTLTISSLEPEDFAVYYCQHWSSKPPTFGGGTKVEIK

SEQ ID NO: 2379 - protein, 106 aa, synthetic construct
  source 1..106: note = CEA-A[CEACAM5]_L2.31
EIVLTQSPATLSLSPGERATLSCRASSSETYIHWYQQKPGQAPKSLIYATSNLASGIPARFSGSGSGTDFTLTISSLEPEDFAVYYCQHWSSKPPTFGGGTKVEIK

SEQ ID NO: 2380 - protein, 106 aa, synthetic construct
  source 1..106: note = CEA-A[CEACAM5]_L2.32
EIVLTQSPATLSLSPGERATLSCRASSSITYIHWYQQKPGQAPKSLIYATSNLASGIPARFSGSGSGTDFTLTISSLEPEDFAVYYCQHWSSKPPTFGGGTKVEIK

SEQ ID NO: 2381 - protein, 106 aa, synthetic construct
  source 1..106: note = CEA-A[CEACAM5]_L2.33
EIVLTQSPATLSLSPGERATLSCRASSSKTYIHWYQQKPGQAPKSLIYATSNLASGIPARFSGSGSGTDFTLTISSLEPEDFAVYYCQHWSSKPPTFGGGTKVEIK

SEQ ID NO: 2382 - protein, 106 aa, synthetic construct
  source 1..106: note = CEA-A[CEACAM5]_L2.34
EIVLTQSPATLSLSPGERATLSCRASSSLTYIHWYQQKPGQAPKSLIYATSNLASGIPARFSGSGSGTDFTLTISSLEPEDFAVYYCQHWSSKPPTFGGGTKVEIK

SEQ ID NO: 2383 - protein, 106 aa, synthetic construct
  source 1..106: note = CEA-A[CEACAM5]_L2.35
EIVLTQSPATLSLSPGERATLSCRASSSTTYIHWYQQKPGQAPKSLIYATSNLASGIPARFSGSGSGTDFTLTISSLEPEDFAVYYCQHWSSKPPTFGGGTKVEIK

SEQ ID NO: 2384 - protein, 106 aa, synthetic construct
  source 1..106: note = CEA-A[CEACAM5]_L2.36
EIVLTQSPATLSLSPGERATLSCRASSSYTYIHWYQQKPGQAPKSLIYATSNLASGIPARFSGSGSGTDFTLTISSLEPEDFAVYYCQHWSSKPPTFGGGTKVEIK

SEQ ID NO: 2385 - protein, 106 aa, synthetic construct
  source 1..106: note = CEA-A[CEACAM5]_L2.37
EIVLTQSPATLSLSPGERATLSCRASSSVAYIHWYQQKPGQAPKSLIYATSNLASGIPARFSGSGSGTDFTLTISSLEPEDFAVYYCQHWSSKPPTFGGGTKVEIK

SEQ ID NO: 2386 - protein, 106 aa, synthetic construct
  source 1..106: note = CEA-A[CEACAM5]_L2.38
EIVLTQSPATLSLSPGERATLSCRASSSVDYIHWYQQKPGQAPKSLIYATSNLASGIPARFSGSGSGTDFTLTISSLEPEDFAVYYCQHWSSKPPTFGGGTKVEIK

SEQ ID NO: 2387 - protein, 106 aa, synthetic construct
  source 1..106: note = CEA-A[CEACAM5]_L2.39
EIVLTQSPATLSLSPGERATLSCRASSSVIYIHWYQQKPGQAPKSLIYATSNLASGIPARFSGSGSGTDFTLTISSLEPEDFAVYYCQHWSSKPPTFGGGTKVEIK

SEQ ID NO: 2388 - protein, 106 aa, synthetic construct
  source 1..106: note = CEA-A[CEACAM5]_L2.40
EIVLTQSPATLSLSPGERATLSCRASSSVKYIHWYQQKPGQAPKSLIYATSNLASGIPARFSGSGSGTDFTLTISSLEPEDFAVYYCQHWSSKPPTFGGGTKVEIK

SEQ ID NO: 2389 - protein, 106 aa, synthetic construct
  source 1..106: note = CEA-A[CEACAM5]_L2.41
EIVLTQSPATLSLSPGERATLSCRASSSVQYIHWYQQKPGQAPKSLIYATSNLASGIPARFSGSGSGTDFTLTISSLEPEDFAVYYCQHWSSKPPTFGGGTKVEIK

SEQ ID NO: 2390 - protein, 106 aa, synthetic construct
  source 1..106: note = CEA-A[CEACAM5]_L2.42
EIVLTQSPATLSLSPGERATLSCRASSSVSYIHWYQQKPGQAPKSLIYATSNLASGIPARFSGSGSGTDFTLTISSLEPEDFAVYYCQHWSSKPPTFGGGTKVEIK

SEQ ID NO: 2391 - protein, 106 aa, synthetic construct
  source 1..106: note = CEA-A[CEACAM5]_L2.43
EIVLTQSPATLSLSPGERATLSCRASSSVVYIHWYQQKPGQAPKSLIYATSNLASGIPARFSGSGSGTDFTLTISSLEPEDFAVYYCQHWSSKPPTFGGGTKVEIK

SEQ ID NO: 2392 - protein, 106 aa, synthetic construct
  source 1..106: note = CEA-A[CEACAM5]_L2.44
EIVLTQSPATLSLSPGERATLSCRASSSVTAIHWYQQKPGQAPKSLIYATSNLASGIPARFSGSGSGTDFTLTISSLEPEDFAVYYCQHWSSKPPTFGGGTKVEIK

SEQ ID NO: 2393 - protein, 106 aa, synthetic construct
  source 1..106: note = CEA-A[CEACAM5]_L2.45
EIVLTQSPATLSLSPGERATLSCRASSSVTDIHWYQQKPGQAPKSLIYATSNLASGIPARFSGSGSGTDFTLTISSLEPEDFAVYYCQHWSSKPPTFGGGTKVEIK

SEQ ID NO: 2394 - protein, 106 aa, synthetic construct
  source 1..106: note = CEA-A[CEACAM5]_L2.46
EIVLTQSPATLSLSPGERATLSCRASSSVTFIHWYQQKPGQAPKSLIYATSNLASGIPARFSGSGSGTDFTLTISSLEPEDFAVYYCQHWSSKPPTFGGGTKVEIK

SEQ ID NO: 2395 - protein, 106 aa, synthetic construct
  source 1..106: note = CEA-A[CEACAM5]_L2.47
EIVLTQSPATLSLSPGERATLSCRASSSVTHIHWYQQKPGQAPKSLIYATSNLASGIPARFSGSGSGTDFTLTISSLEPEDFAVYYCQHWSSKPPTFGGGTKVEIK

SEQ ID NO: 2396 - protein, 106 aa, synthetic construct
  source 1..106: note = CEA-A[CEACAM5]_L2.48
EIVLTQSPATLSLSPGERATLSCRASSSVTKIHWYQQKPGQAPKSLIYATSNLASGIPARFSGSGSGTDFTLTISSLEPEDFAVYYCQHWSSKPPTFGGGTKVEIK

SEQ ID NO: 2397 - protein, 106 aa, synthetic construct
  source 1..106: note = CEA-A[CEACAM5]_L2.49
EIVLTQSPATLSLSPGERATLSCRASSSVTLIHWYQQKPGQAPKSLIYATSNLASGIPARFSGSGSGTDFTLTISSLEPEDFAVYYCQHWSSKPPTFGGGTKVEIK

SEQ ID NO: 2398 - protein, 106 aa, synthetic construct
  source 1..106: note = CEA-A[CEACAM5]_L2.50
EIVLTQSPATLSLSPGERATLSCRASSSVTVIHWYQQKPGQAPKSLIYATSNLASGIPARFSGSGSGTDFTLTISSLEPEDFAVYYCQHWSSKPPTFGGGTKVEIK

SEQ ID NO: 2399 - protein, 106 aa, synthetic construct
  source 1..106: note = CEA-A[CEACAM5]_L2.51
EIVLTQSPATLSLSPGERATLSCRASSSVTYIAWYQQKPGQAPKSLIYATSNLASGIPARFSGSGSGTDFTLTISSLEPEDFAVYYCQHWSSKPPTFGGGTKVEIK

SEQ ID NO: 2400 - protein, 106 aa, synthetic construct
  source 1..106: note = CEA-A[CEACAM5]_L2.52
EIVLTQSPATLSLSPGERATLSCRASSSVTYIDWYQQKPGQAPKSLIYATSNLASGIPARFSGSGSGTDFTLTISSLEPEDFAVYYCQHWSSKPPTFGGGTKVEIK

SEQ ID NO: 2401 - protein, 106 aa, synthetic construct
  source 1..106: note = CEA-A[CEACAM5]_L2.53
EIVLTQSPATLSLSPGERATLSCRASSSVTYIGWYQQKPGQAPKSLIYATSNLASGIPARFSGSGSGTDFTLTISSLEPEDFAVYYCQHWSSKPPTFGGGTKVEIK

SEQ ID NO: 2402 - protein, 106 aa, synthetic construct
  source 1..106: note = CEA-A[CEACAM5]_L2.54
EIVLTQSPATLSLSPGERATLSCRASSSVTYINWYQQKPGQAPKSLIYATSNLASGIPARFSGSGSGTDFTLTISSLEPEDFAVYYCQHWSSKPPTFGGGTKVEIK

SEQ ID NO: 2403 - protein, 106 aa, synthetic construct
  source 1..106: note = CEA-A[CEACAM5]_L2.55
EIVLTQSPATLSLSPGERATLSCRASSSVTYISWYQQKPGQAPKSLIYATSNLASGIPARFSGSGSGTDFTLTISSLEPEDFAVYYCQHWSSKPPTFGGGTKVEIK

SEQ ID NO: 2404 - protein, 106 aa, synthetic construct
  source 1..106: note = CEA-A[CEACAM5]_L2.56
EIVLTQSPATLSLSPGERATLSCRASSSVTYITWYQQKPGQAPKSLIYATSNLASGIPARFSGSGSGTDFTLTISSLEPEDFAVYYCQHWSSKPPTFGGGTKVEIK

SEQ ID NO: 2405 - protein, 106 aa, synthetic construct
  source 1..106: note = CEA-A[CEACAM5]_L2.57
EIVLTQSPATLSLSPGERATLSCRASSSVTYIHWYQQKPGQAPKSLIYDTSNLASGIPARFSGSGSGTDFTLTISSLEPEDFAVYYCQHWSSKPPTFGGGTKVEIK

SEQ ID NO: 2406 - protein, 106 aa, synthetic construct
  source 1..106: note = CEA-A[CEACAM5]_L2.58
EIVLTQSPATLSLSPGERATLSCRASSSVTYIHWYQQKPGQAPKSLIYGTSNLASGIPARFSGSGSGTDFTLTISSLEPEDFAVYYCQHWSSKPPTFGGGTKVEIK

SEQ ID NO: 2407 - protein, 106 aa, synthetic construct
  source 1..106: note = CEA-A[CEACAM5]_L2.59
EIVLTQSPATLSLSPGERATLSCRASSSVTYIHWYQQKPGQAPKSLIYKTSNLASGIPARFSGSGSGTDFTLTISSLEPEDFAVYYCQHWSSKPPTFGGGTKVEIK

SEQ ID NO: 2408 - protein, 106 aa, synthetic construct
  source 1..106: note = CEA-A[CEACAM5]_L2.60
EIVLTQSPATLSLSPGERATLSCRASSSVTYIHWYQQKPGQAPKSLIYLTSNLASGIPARFSGSGSGTDFTLTISSLEPEDFAVYYCQHWSSKPPTFGGGTKVEIK

SEQ ID NO: 2409 - protein, 106 aa, synthetic construct
  source 1..106: note = CEA-A[CEACAM5]_L2.61
EIVLTQSPATLSLSPGERATLSCRASSSVTYIHWYQQKPGQAPKSLIYSTSNLASGIPARFSGSGSGTDFTLTISSLEPEDFAVYYCQHWSSKPPTFGGGTKVEIK

SEQ ID NO: 2410 - protein, 106 aa, synthetic construct
  source 1..106: note = CEA-A[CEACAM5]_L2.62
EIVLTQSPATLSLSPGERATLSCRASSSVTYIHWYQQKPGQAPKSLIYTTSNLASGIPARFSGSGSGTDFTLTISSLEPEDFAVYYCQHWSSKPPTFGGGTKVEIK

SEQ ID NO: 2411 - protein, 106 aa, synthetic construct
  source 1..106: note = CEA-A[CEACAM5]_L2.63
EIVLTQSPATLSLSPGERATLSCRASSSVTYIHWYQQKPGQAPKSLIYVTSNLASGIPARFSGSGSGTDFTLTISSLEPEDFAVYYCQHWSSKPPTFGGGTKVEIK

SEQ ID NO: 2412 - protein, 106 aa, synthetic construct
  source 1..106: note = CEA-A[CEACAM5]_L2.64
EIVLTQSPATLSLSPGERATLSCRASSSVTYIHWYQQKPGQAPKSLIYATSDLASGIPARFSGSGSGTDFTLTISSLEPEDFAVYYCQHWSSKPPTFGGGTKVEIK

SEQ ID NO: 2413 - protein, 106 aa, synthetic construct
  source 1..106: note = CEA-A[CEACAM5]_L2.65
EIVLTQSPATLSLSPGERATLSCRASSSVTYIHWYQQKPGQAPKSLIYATSHLASGIPARFSGSGSGTDFTLTISSLEPEDFAVYYCQHWSSKPPTFGGGTKVEIK

SEQ ID NO: 2414 - protein, 106 aa, synthetic construct
  source 1..106: note = CEA-A[CEACAM5]_L2.66
EIVLTQSPATLSLSPGERATLSCRASSSVTYIHWYQQKPGQAPKSLIYATSQLASGIPARFSGSGSGTDFTLTISSLEPEDFAVYYCQHWSSKPPTFGGGTKVEIK

SEQ ID NO: 2415 - protein, 106 aa, synthetic construct
  source 1..106: note = CEA-A[CEACAM5]_L2.67
EIVLTQSPATLSLSPGERATLSCRASSSVTYIHWYQQKPGQAPKSLIYATSRLASGIPARFSGSGSGTDFTLTISSLEPEDFAVYYCQHWSSKPPTFGGGTKVEIK

SEQ ID NO: 2416 - protein, 106 aa, synthetic construct
  source 1..106: note = CEA-A[CEACAM5]_L2.68
EIVLTQSPATLSLSPGERATLSCRASSSVTYIHWYQQKPGQAPKSLIYATSSLASGIPARFSGSGSGTDFTLTISSLEPEDFAVYYCQHWSSKPPTFGGGTKVEIK

SEQ ID NO: 2417 - protein, 106 aa, synthetic construct
  source 1..106: note = CEA-A[CEACAM5]_L2.69
EIVLTQSPATLSLSPGERATLSCRASSSVTYIHWYQQKPGQAPKSLIYATSTLASGIPARFSGSGSGTDFTLTISSLEPEDFAVYYCQHWSSKPPTFGGGTKVEIK

SEQ ID NO: 2418 - protein, 106 aa, synthetic construct
  source 1..106: note = CEA-A[CEACAM5]_L2.70
EIVLTQSPATLSLSPGERATLSCRASSSVTYIHWYQQKPGQAPKSLIYATSYLASGIPARFSGSGSGTDFTLTISSLEPEDFAVYYCQHWSSKPPTFGGGTKVEIK

SEQ ID NO: 2419 - protein, 106 aa, synthetic construct
  source 1..106: note = CEA-A[CEACAM5]_L2.71
EIVLTQSPATLSLSPGERATLSCRASSSVTYIHWYQQKPGQAPKSLIYATSNLESGIPARFSGSGSGTDFTLTISSLEPEDFAVYYCQHWSSKPPTFGGGTKVEIK

SEQ ID NO: 2420 - protein, 106 aa, synthetic construct
  source 1..106: note = CEA-A[CEACAM5]_L2.72
EIVLTQSPATLSLSPGERATLSCRASSSVTYIHWYQQKPGQAPKSLIYATSNLGSGIPARFSGSGSGTDFTLTISSLEPEDFAVYYCQHWSSKPPTFGGGTKVEIK

SEQ ID NO: 2421 - protein, 106 aa, synthetic construct
  source 1..106: note = CEA-A[CEACAM5]_L2.73
EIVLTQSPATLSLSPGERATLSCRASSSVTYIHWYQQKPGQAPKSLIYATSNLKSGIPARFSGSGSGTDFTLTISSLEPEDFAVYYCQHWSSKPPTFGGGTKVEIK

SEQ ID NO: 2422 - protein, 106 aa, synthetic construct
  source 1..106: note = CEA-A[CEACAM5]_L2.74
EIVLTQSPATLSLSPGERATLSCRASSSVTYIHWYQQKPGQAPKSLIYATSNLLSGIPARFSGSGSGTDFTLTISSLEPEDFAVYYCQHWSSKPPTFGGGTKVEIK

SEQ ID NO: 2423 - protein, 106 aa, synthetic construct
  source 1..106: note = CEA-A[CEACAM5]_L2.75
EIVLTQSPATLSLSPGERATLSCRASSSVTYIHWYQQKPGQAPKSLIYATSNLQSGIPARFSGSGSGTDFTLTISSLEPEDFAVYYCQHWSSKPPTFGGGTKVEIK

SEQ ID NO: 2424 - protein, 106 aa, synthetic construct
  source 1..106: note = CEA-A[CEACAM5]_L2.76
EIVLTQSPATLSLSPGERATLSCRASSSVTYIHWYQQKPGQAPKSLIYATSNLVSGIPARFSGSGSGTDFTLTISSLEPEDFAVYYCQHWSSKPPTFGGGTKVEIK

SEQ ID NO: 2425 - protein, 106 aa, synthetic construct
  source 1..106: note = CEA-A[CEACAM5]_L2.77
EIVLTQSPATLSLSPGERATLSCRASSSVTYIHWYQQKPGQAPKSLIYATSNLAAGIPARFSGSGSGTDFTLTISSLEPEDFAVYYCQHWSSKPPTFGGGTKVEIK

SEQ ID NO: 2426 - protein, 106 aa, synthetic construct
  source 1..106: note = CEA-A[CEACAM5]_L2.78
EIVLTQSPATLSLSPGERATLSCRASSSVTYIHWYQQKPGQAPKSLIYATSNLAEGIPARFSGSGSGTDFTLTISSLEPEDFAVYYCQHWSSKPPTFGGGTKVEIK

SEQ ID NO: 2427 - protein, 106 aa, synthetic construct
  source 1..106: note = CEA-A[CEACAM5]_L2.79
EIVLTQSPATLSLSPGERATLSCRASSSVTYIHWYQQKPGQAPKSLIYATSNLAGGIPARFSGSGSGTDFTLTISSLEPEDFAVYYCQHWSSKPPTFGGGTKVEIK

SEQ ID NO: 2428 - protein, 106 aa, synthetic construct
  source 1..106: note = CEA-A[CEACAM5]_L2.80
EIVLTQSPATLSLSPGERATLSCRASSSVTYIHWYQQKPGQAPKSLIYATSNLAKGIPARFSGSGSGTDFTLTISSLEPEDFAVYYCQHWSSKPPTFGGGTKVEIK

SEQ ID NO: 2429 - protein, 106 aa, synthetic construct
  source 1..106: note = CEA-A[CEACAM5]_L2.81
EIVLTQSPATLSLSPGERATLSCRASSSVTYIHWYQQKPGQAPKSLIYATSNLAQGIPARFSGSGSGTDFTLTISSLEPEDFAVYYCQHWSSKPPTFGGGTKVEIK

SEQ ID NO: 2430 - protein, 106 aa, synthetic construct
  source 1..106: note = CEA-A[CEACAM5]_L2.82
EIVLTQSPATLSLSPGERATLSCRASSSVTYIHWYQQKPGQAPKSLIYATSNLATGIPARFSGSGSGTDFTLTISSLEPEDFAVYYCQHWSSKPPTFGGGTKVEIK

SEQ ID NO: 2431 - protein, 106 aa, synthetic construct
  source 1..106: note = CEA-A[CEACAM5]_L2.83
EIVLTQSPATLSLSPGERATLSCRASSSVTYIHWYQQKPGQAPKSLIYATSNLAVGIPARFSGSGSGTDFTLTISSLEPEDFAVYYCQHWSSKPPTFGGGTKVEIK

SEQ ID NO: 2432 - protein, 106 aa, synthetic construct
  source 1..106: note = CEA-A[CEACAM5]_L2.84
EIVLTQSPATLSLSPGERATLSCRASSSVTYIHWYQQKPGQAPKSLIYATSNLASGIPARFSGSGSGTDFTLTISSLEPEDFAVYYCQHWASKPPTFGGGTKVEIK

SEQ ID NO: 2433 - protein, 106 aa, synthetic construct
  source 1..106: note = CEA-A[CEACAM5]_L2.85
EIVLTQSPATLSLSPGERATLSCRASSSVTYIHWYQQKPGQAPKSLIYATSNLASGIPARFSGSGSGTDFTLTISSLEPEDFAVYYCQHWESKPPTFGGGTKVEIK

SEQ ID NO: 2434 - protein, 106 aa, synthetic construct
  source 1..106: note = CEA-A[CEACAM5]_L2.86
EIVLTQSPATLSLSPGERATLSCRASSSVTYIHWYQQKPGQAPKSLIYATSNLASGIPARFSGSGSGTDFTLTISSLEPEDFAVYYCQHWGSKPPTFGGGTKVEIK

SEQ ID NO: 2435 - protein, 106 aa, synthetic construct
  source 1..106: note = CEA-A[CEACAM5]_L2.87
EIVLTQSPATLSLSPGERATLSCRASSSVTYIHWYQQKPGQAPKSLIYATSNLASGIPARFSGSGSGTDFTLTISSLEPEDFAVYYCQHWKSKPPTFGGGTKVEIK

SEQ ID NO: 2436 - protein, 106 aa, synthetic construct
  source 1..106: note = CEA-A[CEACAM5]_L2.88
EIVLTQSPATLSLSPGERATLSCRASSSVTYIHWYQQKPGQAPKSLIYATSNLASGIPARFSGSGSGTDFTLTISSLEPEDFAVYYCQHWQSKPPTFGGGTKVEIK

SEQ ID NO: 2437 - protein, 106 aa, synthetic construct
  source 1..106: note = CEA-A[CEACAM5]_L2.89
EIVLTQSPATLSLSPGERATLSCRASSSVTYIHWYQQKPGQAPKSLIYATSNLASGIPARFSGSGSGTDFTLTISSLEPEDFAVYYCQHWTSKPPTFGGGTKVEIK

SEQ ID NO: 2438 - protein, 106 aa, synthetic construct
  source 1..106: note = CEA-A[CEACAM5]_L2.90
EIVLTQSPATLSLSPGERATLSCRASSSVTYIHWYQQKPGQAPKSLIYATSNLASGIPARFSGSGSGTDFTLTISSLEPEDFAVYYCQHWVSKPPTFGGGTKVEIK

SEQ ID NO: 2439 - protein, 106 aa, synthetic construct
  source 1..106: note = CEA-A[CEACAM5]_L2.91
EIVLTQSPATLSLSPGERATLSCRASSSVTYIHWYQQKPGQAPKSLIYATSNLASGIPARFSGSGSGTDFTLTISSLEPEDFAVYYCQHWSAKPPTFGGGTKVEIK

SEQ ID NO: 2440 - protein, 106 aa, synthetic construct
  source 1..106: note = CEA-A[CEACAM5]_L2.92
EIVLTQSPATLSLSPGERATLSCRASSSVTYIHWYQQKPGQAPKSLIYATSNLASGIPARFSGSGSGTDFTLTISSLEPEDFAVYYCQHWSDKPPTFGGGTKVEIK

SEQ ID NO: 2441 - protein, 106 aa, synthetic construct
  source 1..106: note = CEA-A[CEACAM5]_L2.93
EIVLTQSPATLSLSPGERATLSCRASSSVTYIHWYQQKPGQAPKSLIYATSNLASGIPARFSGSGSGTDFTLTISSLEPEDFAVYYCQHWSGKPPTFGGGTKVEIK

SEQ ID NO: 2442 - protein, 106 aa, synthetic construct
  source 1..106: note = CEA-A[CEACAM5]_L2.94
EIVLTQSPATLSLSPGERATLSCRASSSVTYIHWYQQKPGQAPKSLIYATSNLASGIPARFSGSGSGTDFTLTISSLEPEDFAVYYCQHWSKKPPTFGGGTKVEIK

SEQ ID NO: 2443 - protein, 106 aa, synthetic construct
  source 1..106: note = CEA-A[CEACAM5]_L2.95
EIVLTQSPATLSLSPGERATLSCRASSSVTYIHWYQQKPGQAPKSLIYATSNLASGIPARFSGSGSGTDFTLTISSLEPEDFAVYYCQHWSQKPPTFGGGTKVEIK

SEQ ID NO: 2444 - protein, 106 aa, synthetic construct
  source 1..106: note = CEA-A[CEACAM5]_L2.96
EIVLTQSPATLSLSPGERATLSCRASSSVTYIHWYQQKPGQAPKSLIYATSNLASGIPARFSGSGSGTDFTLTISSLEPEDFAVYYCQHWSTKPPTFGGGTKVEIK

SEQ ID NO: 2445 - protein, 106 aa, synthetic construct
  source 1..106: note = CEA-A[CEACAM5]_L2.97
EIVLTQSPATLSLSPGERATLSCRASSSVTYIHWYQQKPGQAPKSLIYATSNLASGIPARFSGSGSGTDFTLTISSLEPEDFAVYYCQHWSVKPPTFGGGTKVEIK

SEQ ID NO: 2446 - protein, 106 aa, synthetic construct
  source 1..106: note = CEA-A[CEACAM5]_L2.98
EIVLTQSPATLSLSPGERATLSCRASSSVTYIHWYQQKPGQAPKSLIYATSNLASGIPARFSGSGSGTDFTLTISSLEPEDFAVYYCQHWSSAPPTFGGGTKVEIK

SEQ ID NO: 2447 - protein, 106 aa, synthetic construct
  source 1..106: note = CEA-A[CEACAM5]_L2.99
EIVLTQSPATLSLSPGERATLSCRASSSVTYIHWYQQKPGQAPKSLIYATSNLASGIPARFSGSGSGTDFTLTISSLEPEDFAVYYCQHWSSEPPTFGGGTKVEIK

SEQ ID NO: 2448 - protein, 106 aa, synthetic construct
  source 1..106: note = CEA-A[CEACAM5]_L2.100
EIVLTQSPATLSLSPGERATLSCRASSSVTYIHWYQQKPGQAPKSLIYATSNLASGIPARFSGSGSGTDFTLTISSLEPEDFAVYYCQHWSSGPPTFGGGTKVEIK

SEQ ID NO: 2449 - protein, 106 aa, synthetic construct
  source 1..106: note = CEA-A[CEACAM5]_L2.101
EIVLTQSPATLSLSPGERATLSCRASSSVTYIHWYQQKPGQAPKSLIYATSNLASGIPARFSGSGSGTDFTLTISSLEPEDFAVYYCQHWSSHPPTFGGGTKVEIK

SEQ ID NO: 2450 - protein, 106 aa, synthetic construct
  source 1..106: note = CEA-A[CEACAM5]_L2.102
EIVLTQSPATLSLSPGERATLSCRASSSVTYIHWYQQKPGQAPKSLIYATSNLASGIPARFSGSGSGTDFTLTISSLEPEDFAVYYCQHWSSQPPTFGGGTKVEIK

SEQ ID NO: 2451 - protein, 106 aa, synthetic construct
  source 1..106: note = CEA-A[CEACAM5]_L2.103
EIVLTQSPATLSLSPGERATLSCRASSSVTYIHWYQQKPGQAPKSLIYATSNLASGIPARFSGSGSGTDFTLTISSLEPEDFAVYYCQHWSSRPPTFGGGTKVEIK

SEQ ID NO: 2452 - protein, 106 aa, synthetic construct
  source 1..106: note = CEA-A[CEACAM5]_L2.104
EIVLTQSPATLSLSPGERATLSCRASSSVTYIHWYQQKPGQAPKSLIYATSNLASGIPARFSGSGSGTDFTLTISSLEPEDFAVYYCQHWSSSPPTFGGGTKVEIK

SEQ ID NO: 2453 - protein, 25 aa, synthetic construct
  source 1..25: note = CEA-A VH HFR1
  VARIANT 24: note = A or T
EVQLVESGGGLVQPGGSLRLSCAXS

SEQ ID NO: 2454 - protein, 10 aa, synthetic construct
  source 1..10: note = CEA-A VH HCDR1
  VARIANT 5: note = T, A, E, I, K, Q, S, or V
  VARIANT 6: note = D, A, E, H, K, N, S, or T
  VARIANT 7: note = Y, A, E, F, H, K, L, or V
  VARIANT 8: note = Y, A, D, F, H, K, L, or V
  VARIANT 9: note = M, I, L, or V
  VARIANT 10: note = N, D, G, H, S, or T
GFTFXXXXXX

SEQ ID NO: 2455 - protein, 14 aa, synthetic construct
  source 1..14: note = CEA-A VH HFR2
  VARIANT 9: note = A or G
WVRQAPGKXLEWVG

SEQ ID NO: 2456 - protein, 19 aa, synthetic construct
  source 1..19: note = CEA-A VH HCDR2
  VARIANT 3: note = G, A, D, H, K, Q, S, or T
  VARIANT 4: note = N, E, H, Q, R, S, T, or Y
  VARIANT 6: note = A, E, G, K, L, Q, or V
  VARIANT 7: note = N, E, H, Q, R, S, T, Y, or A
  VARIANT 8: note = G, A, E, H, K, L, Q, or T
  VARIANT 9: note = Y, A, F, G, H, L, S, or V
  VARIANT 10: note = T, A, E, I, K, Q, S, or V
  VARIANT 12: note = E, A, D, G, H, K, Q, or S
FIXXKXXXXXTXYSASVKG

SEQ ID NO: 2457 - protein, 32 aa, synthetic construct
  source 1..32: note = CEA-A VH HFR3
RFTISRDKSKSSLYLQMNSLKTEDTAVYYCTR

SEQ ID NO: 2458 - protein, 11 aa, synthetic construct
  source 1..11: note = CEA-A VH HFR4
WGQGTLVTVSS

SEQ ID NO: 2459 - protein, 23 aa, synthetic construct
  source 1..23: note = CEA-A VL LFR1
  VARIANT 1: note = Q or E
  VARIANT 2: note = T or I
XXVLTQSPATLSLSPGERATLSC

SEQ ID NO: 2460 - protein, 10 aa, synthetic construct
  source 1..10: note = CEA-A VL LCDR1
  VARIANT 4: note = S, A, E, G, K, Q, T, or V
  VARIANT 5: note = S, A, D, G, K, Q, T, or V
  VARIANT 6: note = V, A, E, I, K, L, T, or Y
  VARIANT 7: note = T, A, D, I, K, Q, S, or V
  VARIANT 8: note = Y, A, D, F, H, K, L, or V
  VARIANT 10: note = H, A, D, G, N, S, or T
RASXXXXXIX

SEQ ID NO: 2461 - protein, 15 aa, synthetic construct
  source 1..15: note = CEA-A VL LFR2
  VARIANT 8: note = S or Q
  VARIANT 9: note = S or A
  VARIANT 11: note = R or K
  VARIANT 12: note = S or L
  VARIANT 13: note = L or W
WYQQKPGXXPXXXIY

SEQ ID NO: 2462 - protein, 32 aa, synthetic construct
  source 1..32: note = CEA-A VL LFR3
  VARIANT 2: note = V or I
  VARIANT 14: note = D or S
  VARIANT 15: note = Y or F
  VARIANT 16: note = T or S
GXPARFSGSGSGTXXXLTISSLEPEDFAVYYC

SEQ ID NO: 2463 - protein, 9 aa, synthetic construct
  source 1..9: note = CEA-A VL LCDR3
  VARIANT 3: note = W, F, or Y
  VARIANT 4: note = S, A, E, G, K, Q, T, or V
  VARIANT 5: note = S, A, D, G, K, Q, T, or V
  VARIANT 6: note = K, A, E, G, H, Q, R, or S
QHXXXXPPT

SEQ ID NO: 2464 - protein, 10 aa, synthetic construct
  source 1..10: note = CEA-A VL LFR4
FGGGTKVEIK

SEQ ID NO: 2465 - protein, 121 aa, synthetic construct
  source 1..121: note = 1A7[CD28]_H1.103
EVQLLESGGGLVQPGGSLRLSCAASGFTFSSYYMSWVRQAPGKGLEWVSTISERMDSTYYADSVKGRFTISRDNSKNTLYLQMNSLRAEDTAVYYCAKSGPGLRQVGFDYWGQGTLVTVSS

SEQ ID NO: 2466 - protein, 121 aa, synthetic construct
  source 1..121: note = 1A7[CD28]_H1.104
EVQLLESGGGLVQPGGSLRLSCAASGFTFSSYYMSWVRQAPGKGLEWVSTISERGDPTYYADSVKGRFTISRDNSKNTLYLQMNSLRAEDTAVYYCAKSGPGLRQVGFDYWGQGTLVTVSS

SEQ ID NO: 2467 - protein, 121 aa, synthetic construct
  source 1..121: note = 1A7[CD28]_H1.105
EVQLLESGGGLVQPGGSLRLSCAASGFTFSSYYMSWVRQAPGKGLEWVSTISERLDSTYYADSVKGRFTISRDNSKNTLYLQMNSLRAEDTAVYYCAKSGPGLRQVGFDYWGQGTLVTVSS

SEQ ID NO: 2468 - protein, 121 aa, synthetic construct
  source 1..121: note = 1A7[CD28]_H1.106
EVQLLESGGGLVQPGGSLRLSCAASGFTFSSYYMSWVRQAPGKGLEWVSTISERGDSTYYADSVKGRFTISRDNSKNTLYLQMNSLRAEDTAVYYCAKSGPGLRQVGFDYWGQGTLVTVSS

SEQ ID NO: 2469 - protein, 121 aa, synthetic construct
  source 1..121: note = 1A7[CD28]_H1.107
EVQLLESGGGLVQPGGSLRLSCAASGFTFSSYYMSWVRQAPGKGLEWVSTISESSDVTYYADSVKGRFTISRDNSKNTLYLQMNSLRAEDTAVYYCAKSGPGLRQVGFDYWGQGTLVTVSS

SEQ ID NO: 2470 - protein, 121 aa, synthetic construct
  source 1..121: note = 1A7[CD28]_H1.108
EVQLLESGGGLVQPGGSLRLSCAASGFTFSSYYMSWVRQAPGKGLEWVSTISERNDSTYYADSVKGRFTISRDNSKNTLYLQMNSLRAEDTAVYYCAKSGPGLRQVGFDYWGQGTLVTVSS

SEQ ID NO: 2471 - protein, 121 aa, synthetic construct
  source 1..121: note = 1A7[CD28]_H1.109
EVQLLESGGGLVQPGGSLRLSCAASGFTFSSYYMSWVRQAPGKGLEWVSTISERRDSTYYADSVKGRFTISRDNSKNTLYLQMNSLRAEDTAVYYCAKSGPGLRQVGFDYWGQGTLVTVSS

SEQ ID NO: 2472 - protein, 121 aa, synthetic construct
  source 1..121: note = 1A7[CD28]_H1.110
EVQLLESGGGLVQPGGSLRLSCAASGFTFSSYYMSWVRQAPGKGLEWVWTISERGDSTYYADSVKGRFTISRDNSKNTLYLQMNSLRAEDTAVYYCAKSGPGLRQVGFDYWGQGTLVTVSS

SEQ ID NO: 2473 - protein, 121 aa, synthetic construct
  source 1..121: note = 1A7[CD28]_H1.111
EVQLLESGGGLVQPGGSLRLSCAASGFTFSSYYMSWVRQAPGKGLEWVSTISERSDSTYYADSVKGRFTISRDNSKNTLYLQMNSLRAEDTAVYYCAKSGPGLRQVGFDYWGQGTLVTVSS

SEQ ID NO: 2474 - protein, 121 aa, synthetic construct
  source 1..121: note = 1A7[CD28]_H1.112
EVQLLESGGGLVQPGGSLRLSCAASGFTFSSYYMSWVRQAPGKGLEWVSTISERQDSTYYADSVKGRFTISRDNSKNTLYLQMNSLRAEDTAVYYCAKSGPGLRQVGFDYWGQGTLVTVSS

SEQ ID NO: 2475 - protein, 121 aa, synthetic construct
  source 1..121: note = 1A7[CD28]_H1.113
EVQLLESGGGLVQPGGSLRLSCAASGFTFSSYYMSWVRQAPGKGLEWVSTISERTDSTYYADSVKGRFTISRDNSKNTLYLQMNSLRAEDTAVYYCAKSGPGLRQVGFDYWGQGTLVTVSS

SEQ ID NO: 2476 - protein, 121 aa, synthetic construct
  source 1..121: note = 1A7[CD28]_H1.114
EVQLLESGGGLVQPGGSLRLSCAASGFTFSSYYMSWVRQAPGKGLEWVSTIAERGDSTYYADSVKGRFTISRDNSKNTLYLQMNSLRAEDTAVYYCAKSGPGLRQVGFDYWGQGTLVTVSS

SEQ ID NO: 2477 - protein, 121 aa, synthetic construct
  source 1..121: note = 1A7[CD28]_H1.115
EVQLLESGGGLVQPGGSLRLSCAASGFTFSSYYMSWVRQAPGKGLEWVMTISESGDYTYYADSVKGRFTISRDNSKNTLYLQMNSLRAEDTAVYYCAKSGPGLRQVGFDYWGQGTLVTVSS

SEQ ID NO: 2478 - protein, 121 aa, synthetic construct
  source 1..121: note = 1A7[CD28]_H1.116
EVQLLESGGGLVQPGGSLRLSCAASGFTFSSYYMSWVRQAPGKGLEWVSTISERKDSTYYADSVKGRFTISRDNSKNTLYLQMNSLRAEDTAVYYCAKSGPGLRQVGFDYWGQGTLVTVSS

SEQ ID NO: 2479 - protein, 121 aa, synthetic construct
  source 1..121: note = 1A7[CD28]_H1.117
EVQLLESGGGLVQPGGSLRLSCAASGFTFSSYYMSWVRQAPGKGLEWVSTISERHDSTYYADSVKGRFTISRDNSKNTLYLQMNSLRAEDTAVYYCAKSGPGLRQVGFDYWGQGTLVTVSS

SEQ ID NO: 2480 - protein, 121 aa, synthetic construct
  source 1..121: note = 1A7[CD28]_H1.118
EVQLLESGGGLVQPGGSLRLSCAASGFTFSSYYMSWVRQAPGKGLEWVSTIAESGDPTYYADSVKGRFTISRDNSKNTLYLQMNSLRAEDTAVYYCAKSGPGLRQVGFDYWGQGTLVTVSS

SEQ ID NO: 2481 - protein, 121 aa, synthetic construct
  source 1..121: note = 1A7[CD28]_H1.119
EVQLLESGGGLVQPGGSLRLSCAASGFTFSSYYMSWVRQAPGKGLEWVSTIVERGDVTYYADSVKGRFTISRDNSKNTLYLQMNSLRAEDTAVYYCAKSGPGLRQVGFDYWGQGTLVTVSS

SEQ ID NO: 2482 - protein, 121 aa, synthetic construct
  source 1..121: note = 1A7[CD28]_H1.120
EVQLLESGGGLVQPGGSLRLSCAASGFTFSSYYMSWVRQAPGKGLEWVSTISERYDSTYYADSVKGRFTISRDNSKNTLYLQMNSLRAEDTAVYYCAKSGPGLRQVGFDYWGQGTLVTVSS

SEQ ID NO: 2483 - protein, 121 aa, synthetic construct; identical to SEQ ID NO: 157
  source 1..121: note = 1A7[CD28]_H1.121

SEQ ID NO: 2484 - protein, 121 aa, synthetic construct
  source 1..121: note = 1A7[CD28]_H1.122
EVQLLESGGGLVQPGGSLRLSCAASGFTFSSYYMSWVRQAPGKGLEWVTTISESGDPTYYADSVKGRFTISRDNSKNTLYLQMNSLRAEDTAVYYCAKSGPGLRQVGFDYWGQGTLVTVSS

SEQ ID NO: 2485 - protein, 121 aa, synthetic construct
  source 1..121: note = 1A7[CD28]_H1.123
EVQLLESGGGLVQPGGSLRLSCAASGFTFSSYYMSWVRQAPGKGLEWVSTISENLDSTYYADSVKGRFTISRDNSKNTLYLQMNSLRAEDTAVYYCAKSGPGLRQVGFDYWGQGTLVTVSS

SEQ ID NO: 2486 - protein, 121 aa, synthetic construct
  source 1..121: note = 1A7[CD28]_H1.124
EVQLLESGGGLVQPGGSLRLSCAASGFTFSSYYMSWVRQAPGKGLEWVSTISESADVTYYADSVKGRFTISRDNSKNTLYLQMNSLRAEDTAVYYCAKSGPGLRQVGFDYWGQGTLVTVSS

SEQ ID NO: 2487 - protein, 121 aa, synthetic construct
  source 1..121: note = 1A7[CD28]_H1.125
EVQLLESGGGLVQPGGSLRLSCAASGFTFSSYYMSWVRQAPGKGLEWVSTISEHGLSTYYADSVKGRFTISRDNSKNTLYLQMNSLRAEDTAVYYCAKSGPGLRQVGFDYWGQGTLVTVSS

SEQ ID NO: 2488 - protein, 121 aa, synthetic construct
  source 1..121: note = 1A7[CD28]_H1.126
EVQLLESGGGLVQPGGSLRLSCAASGFTFSSYYMSWVRQAPGKGLEWVSTISERDDSTYYADSVKGRFTISRDNSKNTLYLQMNSLRAEDTAVYYCAKSGPGLRQVGFDYWGQGTLVTVSS

SEQ ID NO: 2489 - protein, 121 aa, synthetic construct
  source 1..121: note = 1A7[CD28]_H1.127
EVQLLESGGGLVQPGGSLRLSCAASGFTFSSYYMSWVRQAPGKGLEWVSTISENRDSTYYADSVKGRFTISRDNSKNTLYLQMNSLRAEDTAVYYCAKSGPGLRQVGFDYWGQGTLVTVSS

SEQ ID NO: 2490 - protein, 121 aa, synthetic construct
  source 1..121: note = 1A7[CD28]_H1.128
EVQLLESGGGLVQPGGSLRLSCAASGFTFSSYYMSWVRQAPGKGLEWVSTISERFDSTYYADSVKGRFTISRDNSKNTLYLQMNSLRAEDTAVYYCAKSGPGLRQVGFDYWGQGTLVTVSS

SEQ ID NO: 2491 - protein, 121 aa, synthetic construct
  source 1..121: note = 1A7[CD28]_H1.129
EVQLLESGGGLVQPGGSLRLSCAASGFTFSSYYMSWVRQAPGKGLEWVSTISERADSTYYADSVKGRFTISRDNSKNTLYLQMNSLRAEDTAVYYCAKSGPGLRQVGFDYWGQGTLVTVSS

SEQ ID NO: 2492 - protein, 121 aa, synthetic construct
  source 1..121: note = 1A7[CD28]_H1.130
EVQLLESGGGLVQPGGSLRLSCAASGFTFSSYYMSWVRQAPGKGLEWVSTISERGDVTYYADSVKGRFTISRDNSKNTLYLQMNSLRAEDTAVYYCAKSGPGLRQVGFDYWGQGTLVTVSS

SEQ ID NO: 2493 - protein, 121 aa, synthetic construct
  source 1..121: note = 1A7[CD28]_H1.131
EVQLLESGGGLVQPGGSLRLSCAASGFTFSSYYMSWVRQAPGKGLEWVSTISEREDSTYYADSVKGRFTISRDNSKNTLYLQMNSLRAEDTAVYYCAKSGPGLRQVGFDYWGQGTLVTVSS

SEQ ID NO: 2494 - protein, 121 aa, synthetic construct
  source 1..121: note = 1A7[CD28]_H1.132
EVQLLESGGGLVQPGGSLRLSCAASGFTFSSYYMSWVRQAPGKGLEWVSTISESSMSTYYADSVKGRFTISRDNSKNTLYLQMNSLRAEDTAVYYCAKSGPGLRQVGFDYWGQGTLVTVSS

SEQ ID NO: 2495 - protein, 121 aa, synthetic construct
  source 1..121: note = 1A7[CD28]_H1.133
EVQLLESGGGLVQPGGSLRLSCAASGFTFSSYYMSWVRQAPGKGLEWVSTISESVDPTYYADSVKGRFTISRDNSKNTLYLQMNSLRAEDTAVYYCAKSGPGLRQVGFDYWGQGTLVTVSS

SEQ ID NO: 2496 - protein, 121 aa, synthetic construct
  source 1..121: note = 1A7[CD28]_H1.134
EVQLLESGGGLVQPGGSLRLSCAASGFTFSSYYMSWVRQAPGKGLEWVMTISERGDSTYYADSVKGRFTISRDNSKNTLYLQMNSLRAEDTAVYYCAKSGPGLRQVGFDYWGQGTLVTVSS

SEQ ID NO: 2497 - protein, 121 aa, synthetic construct
  source 1..121: note = 1A7[CD28]_H1.135
EVQLLESGGGLVQPGGSLRLSCAASGFTFSSYYMSWVRQAPGKGLEWVSTISESWDHTYYADSVKGRFTISRDNSKNTLYLQMNSLRAEDTAVYYCAKSGPGLRQVGFDYWGQGTLVTVSS

SEQ ID NO: 2498 - protein, 121 aa, synthetic construct
  source 1..121: note = 1A7[CD28]_H1.136
EVQLLESGGGLVQPGGSLRLSCAASGFTFSSYYMSWVRQAPGKGLEWVSTISERIDSTYYADSVKGRFTISRDNSKNTLYLQMNSLRAEDTAVYYCAKSGPGLRQVGFDYWGQGTLVTVSS

SEQ ID NO: 2499 - protein, 121 aa, synthetic construct
  source 1..121: note = 1A7[CD28]_H1.137
EVQLLESGGGLVQPGGSLRLSCAASGFTFSSYYMSWVRQAPGKGLEWVVTISERGDSTYYADSVKGRFTISRDNSKNTLYLQMNSLRAEDTAVYYCAKSGPGLRQVGFDYWGQGTLVTVSS

SEQ ID NO: 2500 - protein, 121 aa, synthetic construct
  source 1..121: note = 1A7[CD28]_H1.138
EVQLLESGGGLVQPGGSLRLSCAASGFTFSSYYMSWVRQAPGKGLEWVTTISERGDSTYYADSVKGRFTISRDNSKNTLYLQMNSLRAEDTAVYYCAKSGPGLRQVGFDYWGQGTLVTVSS

SEQ ID NO: 2501 - protein, 30 aa, synthetic construct
  source 1..30: note = 1A7 VH HFR1
EVQLLESGGGLVQPGGSLRLSCAASGFTFS

SEQ ID NO: 2502 - protein, 5 aa, synthetic construct
  source 1..5: note = 1A7 VH HCDR1
SYYMS

SEQ ID NO: 2503 - protein, 14 aa, synthetic construct
  source 1..14: note = 1A7 VH HFR2
  VARIANT 14: note = S, W, M, T, or V
WVRQAPGKGLEWVX

SEQ ID NO: 2504 - protein, 17 aa, synthetic construct
  source 1..17: note = 1A7 VH HCDR2
  VARIANT 3: note = A, V, or S
  VARIANT 5: note = S, N, H, or R
  VARIANT 6: note = G, L, S, N, R, Q, T, K, H, Y, A, D, F, E, V, W, I, or M
  VARIANT 7: note = L, M, or D
  VARIANT 8: note = S, P, V, Y, or H
TIXEXXXXTYYADSVKG

SEQ ID NO: 2505 - protein, 448 aa, synthetic construct; identical to SEQ ID NO: 1939
  source 1..448: note = XENP44341 Chain 1 - CEA-D[CEACAM5]_H1_IgG1_pI(-)_Isosteric_A_PVA_/S267K/L368D/K 370S

SEQ ID NO: 2506 - protein, 710 aa, synthetic construct
  source 1..710: note = XENP44341 Chain 2 - CEA-D[CEACAM5]_H1_IgG1_PVA_/S267K/S364K/E357Q/K447del_(G4S) 3_1A7[CD28]_H1.14_L1.71_scFv(GKPGS)4
EVQLVESGGGVVQPGRSLRLSCSASGFDFTTYWMSWVRQAPGKGLEWIGEIHPDSSTINYAPSLKDRFTISRDNAKNTLFLQMDSLRPEDTGVYFCASLYFGFPWFAYWGQGTPVTVSSASTKGPSVFPLAPSSKSTSGGTAALGCLVKDYFPEPVTVSWNSGALTSGVHTFPAVLQSSGLYSLSSVVTVPSSSLGTQTYICNVNHKPSNTKVDKKVEPKSCDKTHTCPPCPAPPVAGPSVFLFPPKPKDTLMISRTPEVTCVVVDVKHEDPEVKFNWYVDGVEVHNAKTKPREEQYNSTYRVVSVLTVLHQDWLNGKEYKCKVSNKALPAPIEKTISKAKGQPREPQVYTLPPSREQMTKNQVKLTCLVKGFYPSDIAVEWESNGQPENNYKTTPPVLDSDGSFFLYSKLTVDKSRWQQGNVFSCSVMHEALHNHYTQKSLSLSPGGGGGSGGGGSGGGGSEVQLLESGGGLVQPGGSLRLSCAASGFTFSSYYMSWVRQAPGKGLEWVSTISESGDSTYYADSVKGRFTISRDNSKNTLYLQMNSLRAEDTAVYYCAKSGPGLRQVGFDYWGQGTLVTVSSGKPGSGKPGSGKPGSGKPGSDIQMTQSPSSLSASVGDRVTITCRASQSISSYLNWYQQKPGKAPKLLIYAASSLQSGVPSRFSGSGSGTDFTLTISSLQPEDFATYYCQQVYSTPFTFGQGTKLEIK

SEQ ID NO: 2507 - protein, 213 aa, synthetic construct; identical to SEQ ID NO: 1941
  source 1..213: note = XENP44341 Chain 3 - CEA-D[CEACAM5]_H1

SEQ ID NO: 2508 - protein, 449 aa, synthetic construct; identical to SEQ ID NO: 1942
  source 1..449: note = XENP44342 Chain 1 - CEA-E[CEACAM5]_H1_IgG1_pI(-)_Isosteric_A_PVA_/S267K/L368D/K 370S

SEQ ID NO: 2509 - protein, 711 aa, synthetic construct
  source 1..711: note = XENP44342 Chain 2 - CEA-E[CEACAM5]_H1_IgG1_PVA_/S267K/S364K/E357Q/K447del_(G4S) 3_1A7[CD28]_H1.14_L1.71_scFv(GKPGS)4
EVQLQESGPGLVKPGGSLSLSCAASGFVFSSYDMSWVRQTPERGLEWVAYISSGGGITYAPSTVKGRFTVSRDNAKNTLYLQMNSLTSEDTAVYYCAAHYFGSSGPFAYWGQGTLVTVSSASTKGPSVFPLAPSSKSTSGGTAALGCLVKDYFPEPVTVSWNSGALTSGVHTFPAVLQSSGLYSLSSVVTVPSSSLGTQTYICNVNHKPSNTKVDKKVEPKSCDKTHTCPPCPAPPVAGPSVFLFPPKPKDTLMISRTPEVTCVVVDVKHEDPEVKFNWYVDGVEVHNAKTKPREEQYNSTYRVVSVLTVLHQDWLNGKEYKCKVSNKALPAPIEKTISKAKGQPREPQVYTLPPSREQMTKNQVKLTCLVKGFYPSDIAVEWESNGQPENNYKTTPPVLDSDGSFFLYSKLTVDKSRWQQGNVFSCSVMHEALHNHYTQKSLSLSPGGGGGSGGGGSGGGGSEVQLLESGGGLVQPGGSLRLSCAASGFTFSSYYMSWVRQAPGKGLEWVSTISESGDSTYYADSVKGRFTISRDNSKNTLYLQMNSLRAEDTAVYYCAKSGPGLRQVGFDYWGQGTLVTVSSGKPGSGKPGSGKPGSGKPGSDIQMTQSPSSLSASVGDRVTITCRASQSISSYLNWYQQKPGKAPKLLIYAASSLQSGVPSRFSGSGSGTDFTLTISSLQPEDFATYYCQQVYSTPFTFGQGTKLEIK

SEQ ID NO: 2510 - protein, 214 aa, synthetic construct; identical to SEQ ID NO: 1944
  source 1..214: note = XENP44342 Chain 3 - CEA-E[CEACAM5]_H1

SEQ ID NO: 2511 - protein, 450 aa, synthetic construct; identical to SEQ ID NO: 1945
  source 1..450: note = XENP44343 Chain 1 - CEA-F[CEACAM5]_H1_IgG1_pI(-)_Isosteric_A_PVA_/S267K/L368D/K 370S

SEQ ID NO: 2512 - protein, 712 aa, synthetic construct
  source 1..712: note = XENP44343 Chain 2 - CEA-F[CEACAM5]_H1_IgG1_PVA_/S267K/S364K/E357Q/K447del_(G4S) 3_1A7[CD28]_H1.14_L1.71_scFv(GKPGS)4
QVQLVQSGAEVKKPGASVKVSCKASGYTFTEFGMNWVRQAPGQGLEWMGWINTKTGEATYVEEFKGRVTFTTDTSTSTAYMELRSLRSDDTAVYYCARWDFAYYVEAMDYWGQGTTVTVSSASTKGPSVFPLAPSSKSTSGGTAALGCLVKDYFPEPVTVSWNSGALTSGVHTFPAVLQSSGLYSLSSVVTVPSSSLGTQTYICNVNHKPSNTKVDKKVEPKSCDKTHTCPPCPAPPVAGPSVFLFPPKPKDTLMISRTPEVTCVVVDVKHEDPEVKFNWYVDGVEVHNAKTKPREEQYNSTYRVVSVLTVLHQDWLNGKEYKCKVSNKALPAPIEKTISKAKGQPREPQVYTLPPSREQMTKNQVKLTCLVKGFYPSDIAVEWESNGQPENNYKTTPPVLDSDGSFFLYSKLTVDKSRWQQGNVFSCSVMHEALHNHYTQKSLSLSPGGGGGSGGGGSGGGGSEVQLLESGGGLVQPGGSLRLSCAASGFTFSSYYMSWVRQAPGKGLEWVSTISESGDSTYYADSVKGRFTISRDNSKNTLYLQMNSLRAEDTAVYYCAKSGPGLRQVGFDYWGQGTLVTVSSGKPGSGKPGSGKPGSGKPGSDIQMTQSPSSLSASVGDRVTITCRASQSISSYLNWYQQKPGKAPKLLIYAASSLQSGVPSRFSGSGSGTDFTLTISSLQPEDFATYYCQQVYSTPFTFGQGTKLEIK

SEQ ID NO: 2513 - protein, 215 aa, synthetic construct; identical to SEQ ID NO: 1947
  source 1..215: note = XENP44343 Chain 3 - CEA-F[CEACAM5]_H1

SEQ ID NO: 2514 - protein, 450 aa, synthetic construct; identical to SEQ ID NO: 1948
  source 1..450: note = XENP44344 Chain 1 - CEA-A[CEACAM5]_H0_IgG1_pI(-)_Isosteric_A_PVA_/S267K/L368D/K 370S

SEQ ID NO: 2515 - protein, 712 aa, synthetic construct
  source 1..712: note = XENP44344 Chain 2 - CEA-A[CEACAM5]_H0_IgG1_PVA_/S267K/S364K/E357Q/K447del_(G4S) 3_1A7[CD28]_H1.14_L1.71_scFv(GKPGS)4
EVKLVESGGGLVQPGGSLRLSCATSGFTFTDYYMNWVRQPPGKALEWLGFIGNKANGYTTEYSASVKGRFTISRDKSQSILYLQMNTLRAEDSATYYCTRDRGLRFYFDYWGQGTTLTVSSASTKGPSVFPLAPSSKSTSGGTAALGCLVKDYFPEPVTVSWNSGALTSGVHTFPAVLQSSGLYSLSSVVTVPSSSLGTQTYICNVNHKPSNTKVDKKVEPKSCDKTHTCPPCPAPPVAGPSVFLFPPKPKDTLMISRTPEVTCVVVDVKHEDPEVKFNWYVDGVEVHNAKTKPREEQYNSTYRVVSVLTVLHQDWLNGKEYKCKVSNKALPAPIEKTISKAKGQPREPQVYTLPPSREQMTKNQVKLTCLVKGFYPSDIAVEWESNGQPENNYKTTPPVLDSDGSFFLYSKLTVDKSRWQQGNVFSCSVMHEALHNHYTQKSLSLSPGGGGGSGGGGSGGGGSEVQLLESGGGLVQPGGSLRLSCAASGFTFSSYYMSWVRQAPGKGLEWVSTISESGDSTYYADSVKGRFTISRDNSKNTLYLQMNSLRAEDTAVYYCAKSGPGLRQVGFDYWGQGTLVTVSSGKPGSGKPGSGKPGSGKPGSDIQMTQSPSSLSASVGDRVTITCRASQSISSYLNWYQQKPGKAPKLLIYAASSLQSGVPSRFSGSGSGTDFTLTISSLQPEDFATYYCQQVYSTPFTFGQGTKLEIK

SEQ ID NO: 2516 - protein, 213 aa, synthetic construct; identical to SEQ ID NO: 1950
  source 1..213: note = XENP44344 Chain 3 - CEA-A[CEACAM5]_H0

SEQ ID NO: 2517 - protein, 450 aa, synthetic construct; identical to SEQ ID NO: 1951
  source 1..450: note = XENP44345 Chain 1 - CEA-B[CEACAM5]_H1_IgG1_pI(-)_Isosteric_A_PVA_/S267K/L368D/K 370S

SEQ ID NO: 2518 - protein, 712 aa, synthetic construct
  source 1..712: note = XENP44345 Chain 2 - CEA-B[CEACAM5]_H1_IgG1_PVA_/S267K/S364K/E357Q/K447del_(G4S) 3_1A7[CD28]_H1.14_L1.71_scFv(GKPGS)4
EVQLVESGGGLVQPGGSLRLSCAASGFNIKDTYMHWVRQAPGKGLEWVARIDPANGNSKYADSVKGRFTISADTSKNTAYLQMNSLRAEDTAVYYCAPFGYYVSDYAMAYWGQGTLVTVSSASTKGPSVFPLAPSSKSTSGGTAALGCLVKDYFPEPVTVSWNSGALTSGVHTFPAVLQSSGLYSLSSVVTVPSSSLGTQTYICNVNHKPSNTKVDKKVEPKSCDKTHTCPPCPAPPVAGPSVFLFPPKPKDTLMISRTPEVTCVVVDVKHEDPEVKFNWYVDGVEVHNAKTKPREEQYNSTYRVVSVLTVLHQDWLNGKEYKCKVSNKALPAPIEKTISKAKGQPREPQVYTLPPSREQMTKNQVKLTCLVKGFYPSDIAVEWESNGQPENNYKTTPPVLDSDGSFFLYSKLTVDKSRWQQGNVFSCSVMHEALHNHYTQKSLSLSPGGGGGSGGGGSGGGGSEVQLLESGGGLVQPGGSLRLSCAASGFTFSSYYMSWVRQAPGKGLEWVSTISESGDSTYYADSVKGRFTISRDNSKNTLYLQMNSLRAEDTAVYYCAKSGPGLRQVGFDYWGQGTLVTVSSGKPGSGKPGSGKPGSGKPGSDIQMTQSPSSLSASVGDRVTITCRASQSISSYLNWYQQKPGKAPKLLIYAASSLQSGVPSRFSGSGSGTDFTLTISSLQPEDFATYYCQQVYSTPFTFGQGTKLEIK

SEQ ID NO: 2519 - protein, 218 aa, synthetic construct; identical to SEQ ID NO: 1953
  source 1..218: note = XENP44345 Chain 3 - CEA-B[CEACAM5]_H1

SEQ ID NO: 2520 - protein, 448 aa, synthetic construct; identical to SEQ ID NO: 1939
  source 1..448: note = XENP44347 Chain 1 - CEA-D[CEACAM5]_H1_IgG1_pI(-)_Isosteric_A_PVA_/S267K/L368D/K 370S

SEQ ID NO: 2521 - protein, 710 aa, synthetic construct
  source 1..710: note = XENP44347 Chain 2 - CEA-D[CEACAM5]_H1_IgG1_PVA_/S267K/S364K/E357Q/K447del_(G4S) 3_1A7[CD28]_H1_L1.71_scFv(GKPGS)4
EVQLVESGGGVVQPGRSLRLSCSASGFDFTTYWMSWVRQAPGKGLEWIGEIHPDSSTINYAPSLKDRFTISRDNAKNTLFLQMDSLRPEDTGVYFCASLYFGFPWFAYWGQGTPVTVSSASTKGPSVFPLAPSSKSTSGGTAALGCLVKDYFPEPVTVSWNSGALTSGVHTFPAVLQSSGLYSLSSVVTVPSSSLGTQTYICNVNHKPSNTKVDKKVEPKSCDKTHTCPPCPAPPVAGPSVFLFPPKPKDTLMISRTPEVTCVVVDVKHEDPEVKFNWYVDGVEVHNAKTKPREEQYNSTYRVVSVLTVLHQDWLNGKEYKCKVSNKALPAPIEKTISKAKGQPREPQVYTLPPSREQMTKNQVKLTCLVKGFYPSDIAVEWESNGQPENNYKTTPPVLDSDGSFFLYSKLTVDKSRWQQGNVFSCSVMHEALHNHYTQKSLSLSPGGGGGSGGGGSGGGGSEVQLLESGGGLVQPGGSLRLSCAASGFTFSSYAMSWVRQAPGKGLEWVSTISGSGDSTYYADSVKGRFTISRDNSKNTLYLQMNSLRAEDTAVYYCAKSGPGLRQVGFDYWGQGTLVTVSSGKPGSGKPGSGKPGSGKPGSDIQMTQSPSSLSASVGDRVTITCRASQSISSYLNWYQQKPGKAPKLLIYAASSLQSGVPSRFSGSGSGTDFTLTISSLQPEDFATYYCQQVYSTPFTFGQGTKLEIK

SEQ ID NO: 2522 - protein, 213 aa, synthetic construct; identical to SEQ ID NO: 1941
  source 1..213: note = XENP44347 Chain 3 - CEA-D[CEACAM5]_H1

SEQ ID NO: 2523 - protein, 449 aa, synthetic construct; identical to SEQ ID NO: 1942
  source 1..449: note = XENP44348 Chain 1 - CEA-E[CEACAM5]_H1_IgG1_pI(-)_Isosteric_A_PVA_/S267K/L368D/K 370S

SEQ ID NO: 2524 - protein, 711 aa, synthetic construct
  source 1..711: note = XENP44348 Chain 2 - CEA-E[CEACAM5]_H1_IgG1_PVA_/S267K/S364K/E357Q/K447del_(G4S) 3_1A7[CD28]_H1_L1.71_scFv(GKPGS)4
EVQLQESGPGLVKPGGSLSLSCAASGFVFSSYDMSWVRQTPERGLEWVAYISSGGGITYAPSTVKGRFTVSRDNAKNTLYLQMNSLTSEDTAVYYCAAHYFGSSGPFAYWGQGTLVTVSSASTKGPSVFPLAPSSKSTSGGTAALGCLVKDYFPEPVTVSWNSGALTSGVHTFPAVLQSSGLYSLSSVVTVPSSSLGTQTYICNVNHKPSNTKVDKKVEPKSCDKTHTCPPCPAPPVAGPSVFLFPPKPKDTLMISRTPEVTCVVVDVKHEDPEVKFNWYVDGVEVHNAKTKPREEQYNSTYRVVSVLTVLHQDWLNGKEYKCKVSNKALPAPIEKTISKAKGQPREPQVYTLPPSREQMTKNQVKLTCLVKGFYPSDIAVEWESNGQPENNYKTTPPVLDSDGSFFLYSKLTVDKSRWQQGNVFSCSVMHEALHNHYTQKSLSLSPGGGGGSGGGGSGGGGSEVQLLESGGGLVQPGGSLRLSCAASGFTFSSYAMSWVRQAPGKGLEWVSTISGSGDSTYYADSVKGRFTISRDNSKNTLYLQMNSLRAEDTAVYYCAKSGPGLRQVGFDYWGQGTLVTVSSGKPGSGKPGSGKPGSGKPGSDIQMTQSPSSLSASVGDRVTITCRASQSISSYLNWYQQKPGKAPKLLIYAASSLQSGVPSRFSGSGSGTDFTLTISSLQPEDFATYYCQQVYSTPFTFGQGTKLEIK

SEQ ID NO: 2525 - protein, 214 aa, synthetic construct; identical to SEQ ID NO: 1944
  source 1..214: note = XENP44348 Chain 3 - CEA-E[CEACAM5]_H1

SEQ ID NO: 2526 - protein, 450 aa, synthetic construct; identical to SEQ ID NO: 1945
  source 1..450: note = XENP44349 Chain 1 - CEA-F[CEACAM5]_H1_IgG1_pI(-)_Isosteric_A_PVA_/S267K/L368D/K 370S

SEQ ID NO: 2527 - protein, 712 aa, synthetic construct
  source 1..712: note = XENP44349 Chain 2 - CEA-F[CEACAM5]_H1_IgG1_PVA_/S267K/S364K/E357Q/K447del_(G4S) 3_1A7[CD28]_H1_L1.71_scFv(GKPGS)4
QVQLVQSGAEVKKPGASVKVSCKASGYTFTEFGMNWVRQAPGQGLEWMGWINTKTGEATYVEEFKGRVTFTTDTSTSTAYMELRSLRSDDTAVYYCARWDFAYYVEAMDYWGQGTTVTVSSASTKGPSVFPLAPSSKSTSGGTAALGCLVKDYFPEPVTVSWNSGALTSGVHTFPAVLQSSGLYSLSSVVTVPSSSLGTQTYICNVNHKPSNTKVDKKVEPKSCDKTHTCPPCPAPPVAGPSVFLFPPKPKDTLMISRTPEVTCVVVDVKHEDPEVKFNWYVDGVEVHNAKTKPREEQYNSTYRVVSVLTVLHQDWLNGKEYKCKVSNKALPAPIEKTISKAKGQPREPQVYTLPPSREQMTKNQVKLTCLVKGFYPSDIAVEWESNGQPENNYKTTPPVLDSDGSFFLYSKLTVDKSRWQQGNVFSCSVMHEALHNHYTQKSLSLSPGGGGGSGGGGSGGGGSEVQLLESGGGLVQPGGSLRLSCAASGFTFSSYAMSWVRQAPGKGLEWVSTISGSGDSTYYADSVKGRFTISRDNSKNTLYLQMNSLRAEDTAVYYCAKSGPGLRQVGFDYWGQGTLVTVSSGKPGSGKPGSGKPGSGKPGSDIQMTQSPSSLSASVGDRVTITCRASQSISSYLNWYQQKPGKAPKLLIYAASSLQSGVPSRFSGSGSGTDFTLTISSLQPEDFATYYCQQVYSTPFTFGQGTKLEIK

SEQ ID NO: 2528 - protein, 215 aa, synthetic construct; identical to SEQ ID NO: 1947
  source 1..215: note = XENP44349 Chain 3 - CEA-F[CEACAM5]_H1

SEQ ID NO: 2529 - protein, 450 aa, synthetic construct; identical to SEQ ID NO: 1948
  source 1..450: note = XENP44350 Chain 1 - CEA-A[CEACAM5]_H0_IgG1_pI(-)_Isosteric_A_PVA_/S267K/L368D/K 370S

SEQ ID NO: 2530 - protein, 712 aa, synthetic construct
  source 1..712: note = XENP44350 Chain 2 - CEA-A[CEACAM5]_H0_IgG1_PVA_/S267K/S364K/E357Q/K447del_(G4S) 3_1A7[CD28]_H1_L1.71_scFv(GKPGS)4
EVKLVESGGGLVQPGGSLRLSCATSGFTFTDYYMNWVRQPPGKALEWLGFIGNKANGYTTEYSASVKGRFTISRDKSQSILYLQMNTLRAEDSATYYCTRDRGLRFYFDYWGQGTTLTVSSASTKGPSVFPLAPSSKSTSGGTAALGCLVKDYFPEPVTVSWNSGALTSGVHTFPAVLQSSGLYSLSSVVTVPSSSLGTQTYICNVNHKPSNTKVDKKVEPKSCDKTHTCPPCPAPPVAGPSVFLFPPKPKDTLMISRTPEVTCVVVDVKHEDPEVKFNWYVDGVEVHNAKTKPREEQYNSTYRVVSVLTVLHQDWLNGKEYKCKVSNKALPAPIEKTISKAKGQPREPQVYTLPPSREQMTKNQVKLTCLVKGFYPSDIAVEWESNGQPENNYKTTPPVLDSDGSFFLYSKLTVDKSRWQQGNVFSCSVMHEALHNHYTQKSLSLSPGGGGGSGGGGSGGGGSEVQLLESGGGLVQPGGSLRLSCAASGFTFSSYAMSWVRQAPGKGLEWVSTISGSGDSTYYADSVKGRFTISRDNSKNTLYLQMNSLRAEDTAVYYCAKSGPGLRQVGFDYWGQGTLVTVSSGKPGSGKPGSGKPGSGKPGSDIQMTQSPSSLSASVGDRVTITCRASQSISSYLNWYQQKPGKAPKLLIYAASSLQSGVPSRFSGSGSGTDFTLTISSLQPEDFATYYCQQVYSTPFTFGQGTKLEIK

SEQ ID NO: 2531 - protein, 213 aa, synthetic construct; identical to SEQ ID NO: 1950
  source 1..213: note = XENP44350 Chain 3 - CEA-A[CEACAM5]_H0

SEQ ID NO: 2532 - protein, 450 aa, synthetic construct; identical to SEQ ID NO: 1951
  source 1..450: note = XENP44351 Chain 1 - CEA-B[CEACAM5]_H1_IgG1_pI(-)_Isosteric_A_PVA_/S267K/L368D/K 370S

SEQ ID NO: 2533 - protein, 712 aa, synthetic construct
  source 1..712: note = XENP44351 Chain 2 - CEA-B[CEACAM5]_H1_IgG1_PVA_/S267K/S364K/E357Q/K447del_(G4S) 3_1A7[CD28]_H1_L1.71_scFv(GKPGS)4
EVQLVESGGGLVQPGGSLRLSCAASGFNIKDTYMHWVRQAPGKGLEWVARIDPANGNSKYADSVKGRFTISADTSKNTAYLQMNSLRAEDTAVYYCAPFGYYVSDYAMAYWGQGTLVTVSSASTKGPSVFPLAPSSKSTSGGTAALGCLVKDYFPEPVTVSWNSGALTSGVHTFPAVLQSSGLYSLSSVVTVPSSSLGTQTYICNVNHKPSNTKVDKKVEPKSCDKTHTCPPCPAPPVAGPSVFLFPPKPKDTLMISRTPEVTCVVVDVKHEDPEVKFNWYVDGVEVHNAKTKPREEQYNSTYRVVSVLTVLHQDWLNGKEYKCKVSNKALPAPIEKTISKAKGQPREPQVYTLPPSREQMTKNQVKLTCLVKGFYPSDIAVEWESNGQPENNYKTTPPVLDSDGSFFLYSKLTVDKSRWQQGNVFSCSVMHEALHNHYTQKSLSLSPGGGGGSGGGGSGGGGSEVQLLESGGGLVQPGGSLRLSCAASGFTFSSYAMSWVRQAPGKGLEWVSTISGSGDSTYYADSVKGRFTISRDNSKNTLYLQMNSLRAEDTAVYYCAKSGPGLRQVGFDYWGQGTLVTVSSGKPGSGKPGSGKPGSGKPGSDIQMTQSPSSLSASVGDRVTITCRASQSISSYLNWYQQKPGKAPKLLIYAASSLQSGVPSRFSGSGSGTDFTLTISSLQPEDFATYYCQQVYSTPFTFGQGTKLEIK

SEQ ID NO: 2534 - protein, 218 aa, synthetic construct; identical to SEQ ID NO: 1953
  source 1..218: note = XENP44351 Chain 3 - CEA-B[CEACAM5]_H1

SEQ ID NO: 2535 - protein, 448 aa, synthetic construct; identical to SEQ ID NO: 1939
  source 1..448: note = XENP44353 Chain 1 - CEA-D[CEACAM5]_H1_IgG1_pI(-)_Isosteric_A_PVA_/S267K/L368D/K 370S

SEQ ID NO: 2536 - protein, 715 aa, synthetic construct
  source 1..715: note = XENP44353 Chain 2 - CEA-D[CEACAM5]_H1_(G4S)2_1A7[CD28]_H1.14_L1.71_scFv(GKPGS)4 _(G4S)2_Fc(222)_IgG1_PVA_/S267K/S364K/E357Q
EVQLVESGGGVVQPGRSLRLSCSASGFDFTTYWMSWVRQAPGKGLEWIGEIHPDSSTINYAPSLKDRFTISRDNAKNTLFLQMDSLRPEDTGVYFCASLYFGFPWFAYWGQGTPVTVSSASTKGPSVFPLAPSSKSTSGGTAALGCLVKDYFPEPVTVSWNSGALTSGVHTFPAVLQSSGLYSLSSVVTVPSSSLGTQTYICNVNHKPSNTKVDKKVEPKSCGGGGSGGGGSEVQLLESGGGLVQPGGSLRLSCAASGFTFSSYYMSWVRQAPGKGLEWVSTISESGDSTYYADSVKGRFTISRDNSKNTLYLQMNSLRAEDTAVYYCAKSGPGLRQVGFDYWGQGTLVTVSSGKPGSGKPGSGKPGSGKPGSDIQMTQSPSSLSASVGDRVTITCRASQSISSYLNWYQQKPGKAPKLLIYAASSLQSGVPSRFSGSGSGTDFTLTISSLQPEDFATYYCQQVYSTPFTFGQGTKLEIKGGGGSGGGGSKTHTCPPCPAPPVAGPSVFLFPPKPKDTLMISRTPEVTCVVVDVKHEDPEVKFNWYVDGVEVHNAKTKPREEQYNSTYRVVSVLTVLHQDWLNGKEYKCKVSNKALPAPIEKTISKAKGQPREPQVYTLPPSREQMTKNQVKLTCLVKGFYPSDIAVEWESNGQPENNYKTTPPVLDSDGSFFLYSKLTVDKSRWQQGNVFSCSVMHEALHNHYTQKSLSLSPGK

SEQ ID NO: 2537 - protein, 213 aa, synthetic construct; identical to SEQ ID NO: 1941
  source 1..213: note = XENP44353 Chain 3 - CEA-D[CEACAM5]_H1

SEQ ID NO: 2538 - protein, 449 aa, synthetic construct; identical to SEQ ID NO: 1942
  source 1..449: note = XENP44354 Chain 1 - CEA-E[CEACAM5]_H1_IgG1_pI(-)_Isosteric_A_PVA_/S267K/L368D/K 370S

SEQ ID NO: 2539 - protein, 716 aa, synthetic construct
  source 1..716: note = XENP44354 Chain 2 - CEA-E[CEACAM5]_H1_(G4S)2_1A7[CD28]_H1.14_L1.71_scFv(GKPGS)4 _(G4S)2_Fc(222)_IgG1_PVA_/S267K/S364K/E357Q
EVQLQESGPGLVKPGGSLSLSCAASGFVFSSYDMSWVRQTPERGLEWVAYISSGGGITYAPSTVKGRFTVSRDNAKNTLYLQMNSLTSEDTAVYYCAAHYFGSSGPFAYWGQGTLVTVSSASTKGPSVFPLAPSSKSTSGGTAALGCLVKDYFPEPVTVSWNSGALTSGVHTFPAVLQSSGLYSLSSVVTVPSSSLGTQTYICNVNHKPSNTKVDKKVEPKSCGGGGSGGGGSEVQLLESGGGLVQPGGSLRLSCAASGFTFSSYYMSWVRQAPGKGLEWVSTISESGDSTYYADSVKGRFTISRDNSKNTLYLQMNSLRAEDTAVYYCAKSGPGLRQVGFDYWGQGTLVTVSSGKPGSGKPGSGKPGSGKPGSDIQMTQSPSSLSASVGDRVTITCRASQSISSYLNWYQQKPGKAPKLLIYAASSLQSGVPSRFSGSGSGTDFTLTISSLQPEDFATYYCQQVYSTPFTFGQGTKLEIKGGGGSGGGGSKTHTCPPCPAPPVAGPSVFLFPPKPKDTLMISRTPEVTCVVVDVKHEDPEVKFNWYVDGVEVHNAKTKPREEQYNSTYRVVSVLTVLHQDWLNGKEYKCKVSNKALPAPIEKTISKAKGQPREPQVYTLPPSREQMTKNQVKLTCLVKGFYPSDIAVEWESNGQPENNYKTTPPVLDSDGSFFLYSKLTVDKSRWQQGNVFSCSVMHEALHNHYTQKSLSLSPGK

SEQ ID NO: 2540 - protein, 214 aa, synthetic construct; identical to SEQ ID NO: 1944
  source 1..214: note = XENP44354 Chain 3 - CEA-E[CEACAM5]_H1

SEQ ID NO: 2541 - protein, 450 aa, synthetic construct; identical to SEQ ID NO: 1945
  source 1..450: note = XENP44355 Chain 1 - CEA-F[CEACAM5]_H1_IgG1_pI(-)_Isosteric_A_PVA_/S267K/L368D/K 370S

SEQ ID NO: 2542 - protein, 717 aa, synthetic construct
  source 1..717: note = XENP44355 Chain 2 - CEA-F[CEACAM5]_H1_(G4S)2_1A7[CD28]_H1.14_L1.71_scFv(GKPGS)4 _(G4S)2_Fc(222)_IgG1_PVA_/S267K/S364K/E357Q
QVQLVQSGAEVKKPGASVKVSCKASGYTFTEFGMNWVRQAPGQGLEWMGWINTKTGEATYVEEFKGRVTFTTDTSTSTAYMELRSLRSDDTAVYYCARWDFAYYVEAMDYWGQGTTVTVSSASTKGPSVFPLAPSSKSTSGGTAALGCLVKDYFPEPVTVSWNSGALTSGVHTFPAVLQSSGLYSLSSVVTVPSSSLGTQTYICNVNHKPSNTKVDKKVEPKSCGGGGSGGGGSEVQLLESGGGLVQPGGSLRLSCAASGFTFSSYYMSWVRQAPGKGLEWVSTISESGDSTYYADSVKGRFTISRDNSKNTLYLQMNSLRAEDTAVYYCAKSGPGLRQVGFDYWGQGTLVTVSSGKPGSGKPGSGKPGSGKPGSDIQMTQSPSSLSASVGDRVTITCRASQSISSYLNWYQQKPGKAPKLLIYAASSLQSGVPSRFSGSGSGTDFTLTISSLQPEDFATYYCQQVYSTPFTFGQGTKLEIKGGGGSGGGGSKTHTCPPCPAPPVAGPSVFLFPPKPKDTLMISRTPEVTCVVVDVKHEDPEVKFNWYVDGVEVHNAKTKPREEQYNSTYRVVSVLTVLHQDWLNGKEYKCKVSNKALPAPIEKTISKAKGQPREPQVYTLPPSREQMTKNQVKLTCLVKGFYPSDIAVEWESNGQPENNYKTTPPVLDSDGSFFLYSKLTVDKSRWQQGNVFSCSVMHEALHNHYTQKSLSLSPGK

SEQ ID NO: 2543 - protein, 215 aa, synthetic construct; identical to SEQ ID NO: 1947
  source 1..215: note = XENP44355 Chain 3 - CEA-F[CEACAM5]_H1

SEQ ID NO: 2544 - protein, 450 aa, synthetic construct; identical to SEQ ID NO: 1948
  source 1..450: note = XENP44356 Chain 1 - CEA-A[CEACAM5]_H0_IgG1_pI(-)_Isosteric_A_PVA_/S267K/L368D/K 370S

SEQ ID NO: 2545 - protein, 717 aa, synthetic construct
  source 1..717: note = XENP44356 Chain 2 - CEA-A[CEACAM5]_H0_(G4S)2_1A7[CD28]_H1.14_L1.71_scFv(GKPGS)4 _(G4S)2_Fc(222)_IgG1_PVA_/S267K/S364K/E357Q
EVKLVESGGGLVQPGGSLRLSCATSGFTFTDYYMNWVRQPPGKALEWLGFIGNKANGYTTEYSASVKGRFTISRDKSQSILYLQMNTLRAEDSATYYCTRDRGLRFYFDYWGQGTTLTVSSASTKGPSVFPLAPSSKSTSGGTAALGCLVKDYFPEPVTVSWNSGALTSGVHTFPAVLQSSGLYSLSSVVTVPSSSLGTQTYICNVNHKPSNTKVDKKVEPKSCGGGGSGGGGSEVQLLESGGGLVQPGGSLRLSCAASGFTFSSYYMSWVRQAPGKGLEWVSTISESGDSTYYADSVKGRFTISRDNSKNTLYLQMNSLRAEDTAVYYCAKSGPGLRQVGFDYWGQGTLVTVSSGKPGSGKPGSGKPGSGKPGSDIQMTQSPSSLSASVGDRVTITCRASQSISSYLNWYQQKPGKAPKLLIYAASSLQSGVPSRFSGSGSGTDFTLTISSLQPEDFATYYCQQVYSTPFTFGQGTKLEIKGGGGSGGGGSKTHTCPPCPAPPVAGPSVFLFPPKPKDTLMISRTPEVTCVVVDVKHEDPEVKFNWYVDGVEVHNAKTKPREEQYNSTYRVVSVLTVLHQDWLNGKEYKCKVSNKALPAPIEKTISKAKGQPREPQVYTLPPSREQMTKNQVKLTCLVKGFYPSDIAVEWESNGQPENNYKTTPPVLDSDGSFFLYSKLTVDKSRWQQGNVFSCSVMHEALHNHYTQKSLSLSPGK

SEQ ID NO: 2546 - protein, 213 aa, synthetic construct; identical to SEQ ID NO: 1950
  source 1..213: note = XENP44356 Chain 3 - CEA-A[CEACAM5]_H0

SEQ ID NO: 2547 - protein, 450 aa, synthetic construct; identical to SEQ ID NO: 1951
  source 1..450: note = XENP44357 Chain 1 - CEA-B[CEACAM5]_H1_IgG1_pI(-)_Isosteric_A_PVA_/S267K/L368D/K 370S

SEQ ID NO: 2548 - protein, 717 aa, synthetic construct
  source 1..717: note = XENP44357 Chain 2 - CEA-B[CEACAM5]_H1_(G4S)2_1A7[CD28]_H1.14_L1.71_scFv(GKPGS)4 _(G4S)2_Fc(222)_IgG1_PVA_/S267K/S364K/E357Q
EVQLVESGGGLVQPGGSLRLSCAASGFNIKDTYMHWVRQAPGKGLEWVARIDPANGNSKYADSVKGRFTISADTSKNTAYLQMNSLRAEDTAVYYCAPFGYYVSDYAMAYWGQGTLVTVSSASTKGPSVFPLAPSSKSTSGGTAALGCLVKDYFPEPVTVSWNSGALTSGVHTFPAVLQSSGLYSLSSVVTVPSSSLGTQTYICNVNHKPSNTKVDKKVEPKSCGGGGSGGGGSEVQLLESGGGLVQPGGSLRLSCAASGFTFSSYYMSWVRQAPGKGLEWVSTISESGDSTYYADSVKGRFTISRDNSKNTLYLQMNSLRAEDTAVYYCAKSGPGLRQVGFDYWGQGTLVTVSSGKPGSGKPGSGKPGSGKPGSDIQMTQSPSSLSASVGDRVTITCRASQSISSYLNWYQQKPGKAPKLLIYAASSLQSGVPSRFSGSGSGTDFTLTISSLQPEDFATYYCQQVYSTPFTFGQGTKLEIKGGGGSGGGGSKTHTCPPCPAPPVAGPSVFLFPPKPKDTLMISRTPEVTCVVVDVKHEDPEVKFNWYVDGVEVHNAKTKPREEQYNSTYRVVSVLTVLHQDWLNGKEYKCKVSNKALPAPIEKTISKAKGQPREPQVYTLPPSREQMTKNQVKLTCLVKGFYPSDIAVEWESNGQPENNYKTTPPVLDSDGSFFLYSKLTVDKSRWQQGNVFSCSVMHEALHNHYTQKSLSLSPGK

SEQ ID NO: 2549 - protein, 218 aa, synthetic construct; identical to SEQ ID NO: 1953
  source 1..218: note = XENP44357 Chain 3 - CEA-B[CEACAM5]_H1

SEQ ID NO: 2550 - protein, 448 aa, synthetic construct; identical to SEQ ID NO: 1939
  source 1..448: note = XENP44359 Chain 1 - CEA-D[CEACAM5]_H1_IgG1_pI(-)_Isosteric_A_PVA_/S267K/L368D/K 370S

SEQ ID NO: 2551 - protein, 715 aa, synthetic construct
  source 1..715: note = XENP44359 Chain 2 - CEA-D[CEACAM5]_H1_(G4S)2_1A7[CD28]_H1_L1.71_scFv(GKPGS)4_(G 4S)2_Fc(222)_IgG1_PVA_/S267K/S364K/E357Q
EVQLVESGGGVVQPGRSLRLSCSASGFDFTTYWMSWVRQAPGKGLEWIGEIHPDSSTINYAPSLKDRFTISRDNAKNTLFLQMDSLRPEDTGVYFCASLYFGFPWFAYWGQGTPVTVSSASTKGPSVFPLAPSSKSTSGGTAALGCLVKDYFPEPVTVSWNSGALTSGVHTFPAVLQSSGLYSLSSVVTVPSSSLGTQTYICNVNHKPSNTKVDKKVEPKSCGGGGSGGGGSEVQLLESGGGLVQPGGSLRLSCAASGFTFSSYAMSWVRQAPGKGLEWVSTISGSGDSTYYADSVKGRFTISRDNSKNTLYLQMNSLRAEDTAVYYCAKSGPGLRQVGFDYWGQGTLVTVSSGKPGSGKPGSGKPGSGKPGSDIQMTQSPSSLSASVGDRVTITCRASQSISSYLNWYQQKPGKAPKLLIYAASSLQSGVPSRFSGSGSGTDFTLTISSLQPEDFATYYCQQVYSTPFTFGQGTKLEIKGGGGSGGGGSKTHTCPPCPAPPVAGPSVFLFPPKPKDTLMISRTPEVTCVVVDVKHEDPEVKFNWYVDGVEVHNAKTKPREEQYNSTYRVVSVLTVLHQDWLNGKEYKCKVSNKALPAPIEKTISKAKGQPREPQVYTLPPSREQMTKNQVKLTCLVKGFYPSDIAVEWESNGQPENNYKTTPPVLDSDGSFFLYSKLTVDKSRWQQGNVFSCSVMHEALHNHYTQKSLSLSPGK

SEQ ID NO: 2552 - protein, 213 aa, synthetic construct; identical to SEQ ID NO: 1941
  source 1..213: note = XENP44359 Chain 3 - CEA-D[CEACAM5]_H1

SEQ ID NO: 2553 - protein, 449 aa, synthetic construct; identical to SEQ ID NO: 1942
  source 1..449: note = XENP44360 Chain 1 - CEA-E[CEACAM5]_H1_IgG1_pI(-)_Isosteric_A_PVA_/S267K/L368D/K 370S

SEQ ID NO: 2554 - protein, 716 aa, synthetic construct
  source 1..716: note = XENP44360 Chain 2 - CEA-E[CEACAM5]_H1_(G4S)2_1A7[CD28]_H1_L1.71_scFv(GKPGS)4_(G 4S)2_Fc(222)_IgG1_PVA_/S267K/S364K/E357Q
EVQLQESGPGLVKPGGSLSLSCAASGFVFSSYDMSWVRQTPERGLEWVAYISSGGGITYAPSTVKGRFTVSRDNAKNTLYLQMNSLTSEDTAVYYCAAHYFGSSGPFAYWGQGTLVTVSSASTKGPSVFPLAPSSKSTSGGTAALGCLVKDYFPEPVTVSWNSGALTSGVHTFPAVLQSSGLYSLSSVVTVPSSSLGTQTYICNVNHKPSNTKVDKKVEPKSCGGGGSGGGGSEVQLLESGGGLVQPGGSLRLSCAASGFTFSSYAMSWVRQAPGKGLEWVSTISGSGDSTYYADSVKGRFTISRDNSKNTLYLQMNSLRAEDTAVYYCAKSGPGLRQVGFDYWGQGTLVTVSSGKPGSGKPGSGKPGSGKPGSDIQMTQSPSSLSASVGDRVTITCRASQSISSYLNWYQQKPGKAPKLLIYAASSLQSGVPSRFSGSGSGTDFTLTISSLQPEDFATYYCQQVYSTPFTFGQGTKLEIKGGGGSGGGGSKTHTCPPCPAPPVAGPSVFLFPPKPKDTLMISRTPEVTCVVVDVKHEDPEVKFNWYVDGVEVHNAKTKPREEQYNSTYRVVSVLTVLHQDWLNGKEYKCKVSNKALPAPIEKTISKAKGQPREPQVYTLPPSREQMTKNQVKLTCLVKGFYPSDIAVEWESNGQPENNYKTTPPVLDSDGSFFLYSKLTVDKSRWQQGNVFSCSVMHEALHNHYTQKSLSLSPGK

SEQ ID NO: 2555 - protein, 214 aa, synthetic construct; identical to SEQ ID NO: 1944
  source 1..214: note = XENP44360 Chain 3 - CEA-E[CEACAM5]_H1

SEQ ID NO: 2556 - protein, 450 aa, synthetic construct; identical to SEQ ID NO: 1945
  source 1..450: note = XENP44361 Chain 1 - CEA-F[CEACAM5]_H1_IgG1_pI(-)_Isosteric_A_PVA_/S267K/L368D/K 370S

SEQ ID NO: 2557 - protein, 717 aa, synthetic construct
  source 1..717: note = XENP44361 Chain 2 - CEA-F[CEACAM5]_H1_(G4S)2_1A7[CD28]_H1_L1.71_scFv(GKPGS)4_(G 4S)2_Fc(222)_IgG1_PVA_/S267K/S364K/E357Q
QVQLVQSGAEVKKPGASVKVSCKASGYTFTEFGMNWVRQAPGQGLEWMGWINTKTGEATYVEEFKGRVTFTTDTSTSTAYMELRSLRSDDTAVYYCARWDFAYYVEAMDYWGQGTTVTVSSASTKGPSVFPLAPSSKSTSGGTAALGCLVKDYFPEPVTVSWNSGALTSGVHTFPAVLQSSGLYSLSSVVTVPSSSLGTQTYICNVNHKPSNTKVDKKVEPKSCGGGGSGGGGSEVQLLESGGGLVQPGGSLRLSCAASGFTFSSYAMSWVRQAPGKGLEWVSTISGSGDSTYYADSVKGRFTISRDNSKNTLYLQMNSLRAEDTAVYYCAKSGPGLRQVGFDYWGQGTLVTVSSGKPGSGKPGSGKPGSGKPGSDIQMTQSPSSLSASVGDRVTITCRASQSISSYLNWYQQKPGKAPKLLIYAASSLQSGVPSRFSGSGSGTDFTLTISSLQPEDFATYYCQQVYSTPFTFGQGTKLEIKGGGGSGGGGSKTHTCPPCPAPPVAGPSVFLFPPKPKDTLMISRTPEVTCVVVDVKHEDPEVKFNWYVDGVEVHNAKTKPREEQYNSTYRVVSVLTVLHQDWLNGKEYKCKVSNKALPAPIEKTISKAKGQPREPQVYTLPPSREQMTKNQVKLTCLVKGFYPSDIAVEWESNGQPENNYKTTPPVLDSDGSFFLYSKLTVDKSRWQQGNVFSCSVMHEALHNHYTQKSLSLSPGK

SEQ ID NO: 2558 - protein, 215 aa, synthetic construct; identical to SEQ ID NO: 1947
  source 1..215: note = XENP44361 Chain 3 - CEA-F[CEACAM5]_H1

SEQ ID NO: 2559 - protein, 450 aa, synthetic construct; identical to SEQ ID NO: 1948
  source 1..450: note = XENP44362 Chain 1 - CEA-A[CEACAM5]_H0_IgG1_pI(-)_Isosteric_A_PVA_/S267K/L368D/K 370S

SEQ ID NO: 2560 - protein, 717 aa, synthetic construct
  source 1..717: note = XENP44362 Chain 2 - CEA-A[CEACAM5]_H0_(G4S)2_1A7[CD28]_H1_L1.71_scFv(GKPGS)4_(G 4S)2_Fc(222)_IgG1_PVA_/S267K/S364K/E357Q
EVKLVESGGGLVQPGGSLRLSCATSGFTFTDYYMNWVRQPPGKALEWLGFIGNKANGYTTEYSASVKGRFTISRDKSQSILYLQMNTLRAEDSATYYCTRDRGLRFYFDYWGQGTTLTVSSASTKGPSVFPLAPSSKSTSGGTAALGCLVKDYFPEPVTVSWNSGALTSGVHTFPAVLQSSGLYSLSSVVTVPSSSLGTQTYICNVNHKPSNTKVDKKVEPKSCGGGGSGGGGSEVQLLESGGGLVQPGGSLRLSCAASGFTFSSYAMSWVRQAPGKGLEWVSTISGSGDSTYYADSVKGRFTISRDNSKNTLYLQMNSLRAEDTAVYYCAKSGPGLRQVGFDYWGQGTLVTVSSGKPGSGKPGSGKPGSGKPGSDIQMTQSPSSLSASVGDRVTITCRASQSISSYLNWYQQKPGKAPKLLIYAASSLQSGVPSRFSGSGSGTDFTLTISSLQPEDFATYYCQQVYSTPFTFGQGTKLEIKGGGGSGGGGSKTHTCPPCPAPPVAGPSVFLFPPKPKDTLMISRTPEVTCVVVDVKHEDPEVKFNWYVDGVEVHNAKTKPREEQYNSTYRVVSVLTVLHQDWLNGKEYKCKVSNKALPAPIEKTISKAKGQPREPQVYTLPPSREQMTKNQVKLTCLVKGFYPSDIAVEWESNGQPENNYKTTPPVLDSDGSFFLYSKLTVDKSRWQQGNVFSCSVMHEALHNHYTQKSLSLSPGK

SEQ ID NO: 2561 - protein, 213 aa, synthetic construct; identical to SEQ ID NO: 1950
  source 1..213: note = XENP44362 Chain 3 - CEA-A[CEACAM5]_H0

SEQ ID NO: 2562 - protein, 450 aa, synthetic construct; identical to SEQ ID NO: 1951
  source 1..450: note = XENP44363 Chain 1 - CEA-B[CEACAM5]_H1_IgG1_pI(-)_Isosteric_A_PVA_/S267K/L368D/K 370S

SEQ ID NO: 2563 - protein, 717 aa, synthetic construct
  source 1..717: note = XENP44363 Chain 2 - CEA-B[CEACAM5]_H1_(G4S)2_1A7[CD28]_H1_L1.71_scFv(GKPGS)4_(G 4S)2_Fc(222)_IgG1_PVA_/S267K/S364K/E357Q
EVQLVESGGGLVQPGGSLRLSCAASGFNIKDTYMHWVRQAPGKGLEWVARIDPANGNSKYADSVKGRFTISADTSKNTAYLQMNSLRAEDTAVYYCAPFGYYVSDYAMAYWGQGTLVTVSSASTKGPSVFPLAPSSKSTSGGTAALGCLVKDYFPEPVTVSWNSGALTSGVHTFPAVLQSSGLYSLSSVVTVPSSSLGTQTYICNVNHKPSNTKVDKKVEPKSCGGGGSGGGGSEVQLLESGGGLVQPGGSLRLSCAASGFTFSSYAMSWVRQAPGKGLEWVSTISGSGDSTYYADSVKGRFTISRDNSKNTLYLQMNSLRAEDTAVYYCAKSGPGLRQVGFDYWGQGTLVTVSSGKPGSGKPGSGKPGSGKPGSDIQMTQSPSSLSASVGDRVTITCRASQSISSYLNWYQQKPGKAPKLLIYAASSLQSGVPSRFSGSGSGTDFTLTISSLQPEDFATYYCQQVYSTPFTFGQGTKLEIKGGGGSGGGGSKTHTCPPCPAPPVAGPSVFLFPPKPKDTLMISRTPEVTCVVVDVKHEDPEVKFNWYVDGVEVHNAKTKPREEQYNSTYRVVSVLTVLHQDWLNGKEYKCKVSNKALPAPIEKTISKAKGQPREPQVYTLPPSREQMTKNQVKLTCLVKGFYPSDIAVEWESNGQPENNYKTTPPVLDSDGSFFLYSKLTVDKSRWQQGNVFSCSVMHEALHNHYTQKSLSLSPGK

SEQ ID NO: 2564 - protein, 218 aa, synthetic construct; identical to SEQ ID NO: 1953
  source 1..218: note = XENP44363 Chain 3 - CEA-B[CEACAM5]_H1

SEQ ID NO: 2565 - protein, 450 aa, synthetic construct; identical to SEQ ID NO: 1981
  source 1..450: note = XENP44668 Chain 1 - CEA-A[CEACAM5]_H1_IgG1_pI(-)_Isosteric_A_PVA_/S267K/L368D/K 370S/M428L/N434S

SEQ ID NO: 2566 - protein, 717 aa, synthetic construct
  source 1..717: note = XENP44668 Chain 2 - CEA-A[CEACAM5]_H1_(G4S)2_1A7[CD28]_H1_L1.71_scFv(GKPGS)4_(G 4S)2_Fc(222)_IgG1_PVA_/S267K/S364K/E357Q/M428L/N434S
EVQLVESGGGLVQPGGSLRLSCATSGFTFTDYYMNWVRQAPGKALEWVGFIGNKANGYTTEYSASVKGRFTISRDKSKSSLYLQMNSLKTEDTAVYYCTRDRGLRFYFDYWGQGTLVTVSSASTKGPSVFPLAPSSKSTSGGTAALGCLVKDYFPEPVTVSWNSGALTSGVHTFPAVLQSSGLYSLSSVVTVPSSSLGTQTYICNVNHKPSNTKVDKKVEPKSCGGGGSGGGGSEVQLLESGGGLVQPGGSLRLSCAASGFTFSSYAMSWVRQAPGKGLEWVSTISGSGDSTYYADSVKGRFTISRDNSKNTLYLQMNSLRAEDTAVYYCAKSGPGLRQVGFDYWGQGTLVTVSSGKPGSGKPGSGKPGSGKPGSDIQMTQSPSSLSASVGDRVTITCRASQSISSYLNWYQQKPGKAPKLLIYAASSLQSGVPSRFSGSGSGTDFTLTISSLQPEDFATYYCQQVYSTPFTFGQGTKLEIKGGGGSGGGGSKTHTCPPCPAPPVAGPSVFLFPPKPKDTLMISRTPEVTCVVVDVKHEDPEVKFNWYVDGVEVHNAKTKPREEQYNSTYRVVSVLTVLHQDWLNGKEYKCKVSNKALPAPIEKTISKAKGQPREPQVYTLPPSREQMTKNQVKLTCLVKGFYPSDIAVEWESNGQPENNYKTTPPVLDSDGSFFLYSKLTVDKSRWQQGNVFSCSVLHEALHSHYTQKSLSLSPGK

SEQ ID NO: 2567 - protein, 213 aa, synthetic construct; identical to SEQ ID NO: 1983
  source 1..213: note = XENP44668 Chain 3 - CEA-A[CEACAM5]_H1

SEQ ID NO: 2568 - protein, 449 aa, synthetic construct; identical to SEQ ID NO: 1996
  source 1..449: note = XENP44735 Chain 1 - CEA-C[CEACAM5]_H0_IgG1_pI(-)_Isosteric_A_PVA_/S267K/L368D/K 370S

SEQ ID NO: 2569 - protein, 716 aa, synthetic construct
  source 1..716: note = XENP44735 Chain 2 - CEA-C[CEACAM5]_H0L0_(G4S)2_1A7[CD28]_H1_L1.71_scFv(GKPGS)4_ (G4S)2_Fc(222)_IgG1_PVA_/S267K/S364K/E357Q
QVKLQQSGAELVRSGTSVKLSCTASGFNIKDSYMHWLRQGPEQGLEWIGWIDPENGDTEYAPKFQGKATFTTDTSSNTAYLQLSSLTSEDTAVYYCNEGTPTGPYYFDYWGQGTTVTVSSASTKGPSVFPLAPSSKSTSGGTAALGCLVKDYFPEPVTVSWNSGALTSGVHTFPAVLQSSGLYSLSSVVTVPSSSLGTQTYICNVNHKPSNTKVDKKVEPKSCGGGGSGGGGSEVQLLESGGGLVQPGGSLRLSCAASGFTFSSYAMSWVRQAPGKGLEWVSTISGSGDSTYYADSVKGRFTISRDNSKNTLYLQMNSLRAEDTAVYYCAKSGPGLRQVGFDYWGQGTLVTVSSGKPGSGKPGSGKPGSGKPGSDIQMTQSPSSLSASVGDRVTITCRASQSISSYLNWYQQKPGKAPKLLIYAASSLQSGVPSRFSGSGSGTDFTLTISSLQPEDFATYYCQQVYSTPFTFGQGTKLEIKGGGGSGGGGSKTHTCPPCPAPPVAGPSVFLFPPKPKDTLMISRTPEVTCVVVDVKHEDPEVKFNWYVDGVEVHNAKTKPREEQYNSTYRVVSVLTVLHQDWLNGKEYKCKVSNKALPAPIEKTISKAKGQPREPQVYTLPPSREQMTKNQVKLTCLVKGFYPSDIAVEWESNGQPENNYKTTPPVLDSDGSFFLYSKLTVDKSRWQQGNVFSCSVMHEALHNHYTQKSLSLSPGK

SEQ ID NO: 2570 - protein, 213 aa, synthetic construct; identical to SEQ ID NO: 1998
  source 1..213: note = XENP44735 Chain 3 - CEA-C[CEACAM5]_H0

SEQ ID NO: 2571 - protein, 449 aa, synthetic construct; identical to SEQ ID NO: 1999
  source 1..449: note = XENP44737 Chain 1 - CEA-C[CEACAM5]_H1_IgG1_pI(-)_Isosteric_A_PVA_/S267K/L368D/K 370S

SEQ ID NO: 2572 - protein, 716 aa, synthetic construct
  source 1..716: note = XENP44737 Chain 2 - CEA-C[CEACAM5]_H1_(G4S)2_1A7[CD28]_H1_L1.71_scFv(GKPGS)4_(G 4S)2_Fc(222)_IgG1_PVA_/S267K/S364K/E357Q
QVQLVQSGAEVKKPGASVKVSCKASGFNIKDSYMHWLRQAPGQGLEWMGWIDPENGDTEYAPKFQGRVTMTTDTSINTAYMELSRLRSDDTAVYYCNEGTPTGPYYFDYWGQGTLVTVSSASTKGPSVFPLAPSSKSTSGGTAALGCLVKDYFPEPVTVSWNSGALTSGVHTFPAVLQSSGLYSLSSVVTVPSSSLGTQTYICNVNHKPSNTKVDKKVEPKSCGGGGSGGGGSEVQLLESGGGLVQPGGSLRLSCAASGFTFSSYAMSWVRQAPGKGLEWVSTISGSGDSTYYADSVKGRFTISRDNSKNTLYLQMNSLRAEDTAVYYCAKSGPGLRQVGFDYWGQGTLVTVSSGKPGSGKPGSGKPGSGKPGSDIQMTQSPSSLSASVGDRVTITCRASQSISSYLNWYQQKPGKAPKLLIYAASSLQSGVPSRFSGSGSGTDFTLTISSLQPEDFATYYCQQVYSTPFTFGQGTKLEIKGGGGSGGGGSKTHTCPPCPAPPVAGPSVFLFPPKPKDTLMISRTPEVTCVVVDVKHEDPEVKFNWYVDGVEVHNAKTKPREEQYNSTYRVVSVLTVLHQDWLNGKEYKCKVSNKALPAPIEKTISKAKGQPREPQVYTLPPSREQMTKNQVKLTCLVKGFYPSDIAVEWESNGQPENNYKTTPPVLDSDGSFFLYSKLTVDKSRWQQGNVFSCSVMHEALHNHYTQKSLSLSPGK

SEQ ID NO: 2573 - protein, 213 aa, synthetic construct; identical to SEQ ID NO: 2001
  source 1..213: note = XENP44737 Chain 3 - CEA-C[CEACAM5]_H1

SEQ ID NO: 2574 - protein, 684 aa, synthetic construct
  source 1..684: note = XENP44565 Chain 1 - CEA-A[CEACAM5]_H0_(G4A)2_CEA-A[CEACAM5]_H0_IgG1_pI(-)_Isost eric_A_PVA_/S267K/L368D/K370S
EVKLVESGGGLVQPGGSLRLSCATSGFTFTDYYMNWVRQPPGKALEWLGFIGNKANGYTTEYSASVKGRFTISRDKSQSILYLQMNTLRAEDSATYYCTRDRGLRFYFDYWGQGTTLTVSSASTKGPSVFPLAPSSKSTSGGTAALGCLVKDYFPEPVTVSWNSGALTSGVHTFPAVLQSSGLYSLSSVVTVPSSSLGTQTYICNVNHKPSDTKVDKKVEPKSCGGGGAGGGGAEVKLVESGGGLVQPGGSLRLSCATSGFTFTDYYMNWVRQPPGKALEWLGFIGNKANGYTTEYSASVKGRFTISRDKSQSILYLQMNTLRAEDSATYYCTRDRGLRFYFDYWGQGTTLTVSSASTKGPSVFPLAPSSKSTSGGTAALGCLVKDYFPEPVTVSWNSGALTSGVHTFPAVLQSSGLYSLSSVVTVPSSSLGTQTYICNVNHKPSDTKVDKKVEPKSCDKTHTCPPCPAPPVAGPSVFLFPPKPKDTLMISRTPEVTCVVVDVKHEDPEVKFNWYVDGVEVHNAKTKPREEEYNSTYRVVSVLTVLHQDWLNGKEYKCKVSNKALPAPIEKTISKAKGQPREPQVYTLPPSREEMTKNQVSLTCDVSGFYPSDIAVEWESDGQPENNYKTTPPVLDSDGSFFLYSKLTVDKSRWEQGDVFSCSVLHEALHSHYTQKSLSLSPGK

SEQ ID NO: 2575 - protein, 479 aa, synthetic construct; identical to SEQ ID NO: 480
  source 1..479: note = XENP44565 Chain 2 - 1A7[CD28]_H1.14_L1.71_scFv(GKPGS)4_Fc(216)_IgG1_C220S/PVA_/ S267K/S364K/E357Q

SEQ ID NO: 2576 - protein, 213 aa, synthetic construct; identical to SEQ ID NO: 1950
  source 1..213: note = XENP44565 Chain 3 - CEA-A[CEACAM5]_L0

SEQ ID NO: 2577 - protein, 684 aa, synthetic construct
  source 1..684: note = XENP44566 Chain 1 - CEA-B[CEACAM5]_H1_(G4A)2_CEA-B[CEACAM5]_H1_IgG1_pI(-)_Isost eric_A_PVA_/S267K/L368D/K370S
EVQLVESGGGLVQPGGSLRLSCAASGFNIKDTYMHWVRQAPGKGLEWVARIDPANGNSKYADSVKGRFTISADTSKNTAYLQMNSLRAEDTAVYYCAPFGYYVSDYAMAYWGQGTLVTVSSASTKGPSVFPLAPSSKSTSGGTAALGCLVKDYFPEPVTVSWNSGALTSGVHTFPAVLQSSGLYSLSSVVTVPSSSLGTQTYICNVNHKPSDTKVDKKVEPKSCGGGGAGGGGAEVQLVESGGGLVQPGGSLRLSCAASGFNIKDTYMHWVRQAPGKGLEWVARIDPANGNSKYADSVKGRFTISADTSKNTAYLQMNSLRAEDTAVYYCAPFGYYVSDYAMAYWGQGTLVTVSSASTKGPSVFPLAPSSKSTSGGTAALGCLVKDYFPEPVTVSWNSGALTSGVHTFPAVLQSSGLYSLSSVVTVPSSSLGTQTYICNVNHKPSDTKVDKKVEPKSCDKTHTCPPCPAPPVAGPSVFLFPPKPKDTLMISRTPEVTCVVVDVKHEDPEVKFNWYVDGVEVHNAKTKPREEEYNSTYRVVSVLTVLHQDWLNGKEYKCKVSNKALPAPIEKTISKAKGQPREPQVYTLPPSREEMTKNQVSLTCDVSGFYPSDIAVEWESDGQPENNYKTTPPVLDSDGSFFLYSKLTVDKSRWEQGDVFSCSVLHEALHSHYTQKSLSLSPGK

SEQ ID NO: 2578 - protein, 479 aa, synthetic construct; identical to SEQ ID NO: 480
  source 1..479: note = XENP44566 Chain 2 - 1A7[CD28]_H1.14_L1.71_scFv(GKPGS)4_Fc(216)_IgG1_C220S/PVA_/ S267K/S364K/E357Q

SEQ ID NO: 2579 - protein, 218 aa, synthetic construct; identical to SEQ ID NO: 1953
  source 1..218: note = XENP44566 Chain 3 - CEA-B[CEACAM5]_L1

SEQ ID NO: 2580 - protein, 684 aa, synthetic construct; identical to SEQ ID NO: 2574
  source 1..684: note = XENP44567 Chain 1 - CEA-A[CEACAM5]_H0_(G4A)2_CEA-A[CEACAM5]_H0_IgG1_pI(-)_Isost eric_A_PVA_/S267K/L368D/K370S

SEQ ID NO: 2581 - protein, 479 aa, synthetic construct; identical to SEQ ID NO: 1955
  source 1..479: note = XENP44567 Chain 2 - 1A7[CD28]_H1_L1.71_scFv(GKPGS)4_Fc(216)_IgG1_C220S/PVA_/S26 7K/S364K/E357Q

SEQ ID NO: 2582 - protein, 213 aa, synthetic construct; identical to SEQ ID NO: 1950
  source 1..213: note = XENP44567 Chain 3 - CEA-A[CEACAM5]_L0

SEQ ID NO: 2583 - protein, 684 aa, synthetic construct; identical to SEQ ID NO: 2577
  source 1..684: note = XENP44568 Chain 1 - CEA-B[CEACAM5]_H1_(G4A)2_CEA-B[CEACAM5]_H1_IgG1_pI(-)_Isost eric_A_PVA_/S267K/L368D/K370S

SEQ ID NO: 2584 - protein, 479 aa, synthetic construct; identical to SEQ ID NO: 1955
  source 1..479: note = XENP44568 Chain 2 - 1A7[CD28]_H1_L1.71_scFv(GKPGS)4_Fc(216)_IgG1_C220S/PVA_/S26 7K/S364K/E357Q

SEQ ID NO: 2585 - protein, 218 aa, synthetic construct; identical to SEQ ID NO: 1953
  source 1..218: note = XENP44568 Chain 3 - CEA-B[CEACAM5]_L1

SEQ ID NO: 2586 - protein, 682 aa, synthetic construct
  source 1..682: note = XENP44738 Chain 1 - CEA-C[CEACAM5]_H0_(G4A)2_CEA-C[CEACAM5]_H0_IgG1_pI(-)_Isost eric_A_PVA_/S267K/L368D/K370S
QVKLQQSGAELVRSGTSVKLSCTASGFNIKDSYMHWLRQGPEQGLEWIGWIDPENGDTEYAPKFQGKATFTTDTSSNTAYLQLSSLTSEDTAVYYCNEGTPTGPYYFDYWGQGTTVTVSSASTKGPSVFPLAPSSKSTSGGTAALGCLVKDYFPEPVTVSWNSGALTSGVHTFPAVLQSSGLYSLSSVVTVPSSSLGTQTYICNVNHKPSDTKVDKKVEPKSCGGGGAGGGGAQVKLQQSGAELVRSGTSVKLSCTASGFNIKDSYMHWLRQGPEQGLEWIGWIDPENGDTEYAPKFQGKATFTTDTSSNTAYLQLSSLTSEDTAVYYCNEGTPTGPYYFDYWGQGTTVTVSSASTKGPSVFPLAPSSKSTSGGTAALGCLVKDYFPEPVTVSWNSGALTSGVHTFPAVLQSSGLYSLSSVVTVPSSSLGTQTYICNVNHKPSDTKVDKKVEPKSCDKTHTCPPCPAPPVAGPSVFLFPPKPKDTLMISRTPEVTCVVVDVKHEDPEVKFNWYVDGVEVHNAKTKPREEEYNSTYRVVSVLTVLHQDWLNGKEYKCKVSNKALPAPIEKTISKAKGQPREPQVYTLPPSREEMTKNQVSLTCDVSGFYPSDIAVEWESDGQPENNYKTTPPVLDSDGSFFLYSKLTVDKSRWEQGDVFSCSVLHEALHSHYTQKSLSLSPGK

SEQ ID NO: 2587 - protein, 479 aa, synthetic construct; identical to SEQ ID NO: 1955
  source 1..479: note = XENP44738 Chain 2 - 1A7[CD28]_H1_L1.71_scFv(GKPGS)4_Fc(216)_IgG1_C220S/PVA_/S26 7K/S364K/E357Q

SEQ ID NO: 2588 - protein, 213 aa, synthetic construct; identical to SEQ ID NO: 1998
  source 1..213: note = XENP44738 Chain 3 - CEA-C[CEACAM5]_L0

SEQ ID NO: 2589 - protein, 682 aa, synthetic construct
  source 1..682: note = XENP44740 Chain 1 - CEA-C[CEACAM5]_H1_(G4A)2_CEA-C[CEACAM5]_H1_IgG1_pI(-)_Isost eric_A_PVA_/S267K/L368D/K370S
QVQLVQSGAEVKKPGASVKVSCKASGFNIKDSYMHWLRQAPGQGLEWMGWIDPENGDTEYAPKFQGRVTMTTDTSINTAYMELSRLRSDDTAVYYCNEGTPTGPYYFDYWGQGTLVTVSSASTKGPSVFPLAPSSKSTSGGTAALGCLVKDYFPEPVTVSWNSGALTSGVHTFPAVLQSSGLYSLSSVVTVPSSSLGTQTYICNVNHKPSDTKVDKKVEPKSCGGGGAGGGGAQVQLVQSGAEVKKPGASVKVSCKASGFNIKDSYMHWLRQAPGQGLEWMGWIDPENGDTEYAPKFQGRVTMTTDTSINTAYMELSRLRSDDTAVYYCNEGTPTGPYYFDYWGQGTLVTVSSASTKGPSVFPLAPSSKSTSGGTAALGCLVKDYFPEPVTVSWNSGALTSGVHTFPAVLQSSGLYSLSSVVTVPSSSLGTQTYICNVNHKPSDTKVDKKVEPKSCDKTHTCPPCPAPPVAGPSVFLFPPKPKDTLMISRTPEVTCVVVDVKHEDPEVKFNWYVDGVEVHNAKTKPREEEYNSTYRVVSVLTVLHQDWLNGKEYKCKVSNKALPAPIEKTISKAKGQPREPQVYTLPPSREEMTKNQVSLTCDVSGFYPSDIAVEWESDGQPENNYKTTPPVLDSDGSFFLYSKLTVDKSRWEQGDVFSCSVLHEALHSHYTQKSLSLSPGK

SEQ ID NO: 2590 - protein, 479 aa, synthetic construct; identical to SEQ ID NO: 1955
  source 1..479: note = XENP44740 Chain 2 - 1A7[CD28]_H1_L1.71_scFv(GKPGS)4_Fc(216)_IgG1_C220S/PVA_/S26 7K/S364K/E357Q

SEQ ID NO: 2591 - protein, 213 aa, synthetic construct; identical to SEQ ID NO: 2001
  source 1..213: note = XENP44740 Chain 3 - CEA-C[CEACAM5]_L1

SEQ ID NO: 2592 - protein, 684 aa, synthetic construct
  source 1..684: note = XENP44757 Chain 1 - CEA-A[CEACAM5]_H1_(G4A)2_CEA-A[CEACAM5]_H1_IgG1_pI(-)_Isost eric_A_PVA_/S267K/L368D/K370S
EVQLVESGGGLVQPGGSLRLSCATSGFTFTDYYMNWVRQAPGKALEWVGFIGNKANGYTTEYSASVKGRFTISRDKSKSSLYLQMNSLKTEDTAVYYCTRDRGLRFYFDYWGQGTLVTVSSASTKGPSVFPLAPSSKSTSGGTAALGCLVKDYFPEPVTVSWNSGALTSGVHTFPAVLQSSGLYSLSSVVTVPSSSLGTQTYICNVNHKPSDTKVDKKVEPKSCGGGGAGGGGAEVQLVESGGGLVQPGGSLRLSCATSGFTFTDYYMNWVRQAPGKALEWVGFIGNKANGYTTEYSASVKGRFTISRDKSKSSLYLQMNSLKTEDTAVYYCTRDRGLRFYFDYWGQGTLVTVSSASTKGPSVFPLAPSSKSTSGGTAALGCLVKDYFPEPVTVSWNSGALTSGVHTFPAVLQSSGLYSLSSVVTVPSSSLGTQTYICNVNHKPSDTKVDKKVEPKSCDKTHTCPPCPAPPVAGPSVFLFPPKPKDTLMISRTPEVTCVVVDVKHEDPEVKFNWYVDGVEVHNAKTKPREEEYNSTYRVVSVLTVLHQDWLNGKEYKCKVSNKALPAPIEKTISKAKGQPREPQVYTLPPSREEMTKNQVSLTCDVSGFYPSDIAVEWESDGQPENNYKTTPPVLDSDGSFFLYSKLTVDKSRWEQGDVFSCSVLHEALHSHYTQKSLSLSPGK

SEQ ID NO: 2593 - protein, 479 aa, synthetic construct; identical to SEQ ID NO: 1955
  source 1..479: note = XENP44757 Chain 2 - 1A7[CD28]_H1_L1.71_scFv(GKPGS)4_Fc(216)_IgG1_C220S/PVA_/S26 7K/S364K/E357Q

SEQ ID NO: 2594 - protein, 213 aa, synthetic construct; identical to SEQ ID NO: 1983
  source 1..213: note = XENP44757 Chain 3 - CEA-A[CEACAM5]_L1

SEQ ID NO: 2595 - protein, 684 aa, synthetic construct; identical to SEQ ID NO: 2592
  source 1..684: note = XENP44758 Chain 1 - CEA-A[CEACAM5]_H1_(G4A)2_CEA-A[CEACAM5]_H1_IgG1_pI(-)_Isost eric_A_PVA_/S267K/L368D/K370S

SEQ ID NO: 2596 - protein, 479 aa, synthetic construct; identical to SEQ ID NO: 1955
  source 1..479: note = XENP44758 Chain 2 - 1A7[CD28]_H1_L1.71_scFv(GKPGS)4_Fc(216)_IgG1_C220S/PVA_/S26 7K/S364K/E357Q

SEQ ID NO: 2597 - protein, 213 aa, synthetic construct; identical to SEQ ID NO: 2007
  source 1..213: note = XENP44758 Chain 3 - CEA-A[CEACAM5]_L2

SEQ ID NO: 2598 - protein, 121 aa, synthetic construct
  source 1..121: note = 1A7[CD28]_H1.1_L1 [S-S] Variable Heavy (vh) Domain
EVQLLESGGGLVQPGGSLRLSCAASGFTFSSYYMSWVRQAPGKCLEWVSTISGSGDSTYYADSVKGRFTISRDNSKNTLYLQMNSLRAEDTAVYYCAKSGPGLRQVGFDYWGQGTLVTVSS

SEQ ID NO: 2599 - protein, 5 aa, synthetic construct
  source 1..5: note = 1A7[CD28]_H1.1_L1 [S-S] vhCDR1
SYYMS

SEQ ID NO: 2600 - protein, 17 aa, synthetic construct
  source 1..17: note = 1A7[CD28]_H1.1_L1 [S-S] vhCDR2
TISGSGDSTYYADSVKG

SEQ ID NO: 2601 - protein, 12 aa, synthetic construct
  source 1..12: note = 1A7[CD28]_H1.1_L1 [S-S] vhCDR3
SGPGLRQVGFDY

SEQ ID NO: 2602 - protein, 107 aa, synthetic construct
  source 1..107: note = 1A7[CD28]_H1.1_L1 [S-S] Variable Light (vl) Domain
DIQMTQSPSSLSASVGDRVTITCRASQSISSYLNWYQQKPGKAPKLLIYAASSLQSGVPSRFSGSGSGTDFTLTISSLQPEDFATYYCQQSYSTPFTFGCGTKLEIK

SEQ ID NO: 2603 - protein, 11 aa, synthetic construct
  source 1..11: note = 1A7[CD28]_H1.1_L1 [S-S] vlCDR1
RASQSISSYLN

SEQ ID NO: 2604 - protein, 7 aa, synthetic construct
  source 1..7: note = 1A7[CD28]_H1.1_L1 [S-S] vlCDR2
AASSLQS

SEQ ID NO: 2605 - protein, 9 aa, synthetic construct
  source 1..9: note = 1A7[CD28]_H1.1_L1 [S-S] vlCDR3
QQSYSTPFT

SEQ ID NO: 2606 - protein, 248 aa, synthetic construct
  source 1..248: note = 1A7[CD28]_H1.1_L1 [S-S] scFv
EVQLLESGGGLVQPGGSLRLSCAASGFTFSSYYMSWVRQAPGKCLEWVSTISGSGDSTYYADSVKGRFTISRDNSKNTLYLQMNSLRAEDTAVYYCAKSGPGLRQVGFDYWGQGTLVTVSSGKPGSGKPGSGKPGSGKPGSDIQMTQSPSSLSASVGDRVTITCRASQSISSYLNWYQQKPGKAPKLLIYAASSLQSGVPSRFSGSGSGTDFTLTISSLQPEDFATYYCQQSYSTPFTFGCGTKLEIK

SEQ ID NO: 2607 - protein, 121 aa, synthetic construct
  source 1..121: note = 1A7[CD28]_H1_L1.71 [S-S] Variable Heavy (vh) Domain
EVQLLESGGGLVQPGGSLRLSCAASGFTFSSYAMSWVRQAPGKCLEWVSTISGSGDSTYYADSVKGRFTISRDNSKNTLYLQMNSLRAEDTAVYYCAKSGPGLRQVGFDYWGQGTLVTVSS

SEQ ID NO: 2608 - protein, 5 aa, synthetic construct
  source 1..5: note = 1A7[CD28]_H1_L1.71 [S-S] vhCDR1
SYAMS

SEQ ID NO: 2609 - protein, 17 aa, synthetic construct
  source 1..17: note = 1A7[CD28]_H1_L1.71 [S-S] vhCDR2
TISGSGDSTYYADSVKG

SEQ ID NO: 2610 - protein, 12 aa, synthetic construct
  source 1..12: note = 1A7[CD28]_H1_L1.71 [S-S] vhCDR3
SGPGLRQVGFDY

SEQ ID NO: 2611 - protein, 107 aa, synthetic construct
  source 1..107: note = 1A7[CD28]_H1_L1.71 [S-S] Variable Light (vl) Domain
DIQMTQSPSSLSASVGDRVTITCRASQSISSYLNWYQQKPGKAPKLLIYAASSLQSGVPSRFSGSGSGTDFTLTISSLQPEDFATYYCQQVYSTPFTFGCGTKLEIK

SEQ ID NO: 2612 - protein, 11 aa, synthetic construct
  source 1..11: note = 1A7[CD28]_H1_L1.71 [S-S] vlCDR1
RASQSISSYLN

SEQ ID NO: 2613 - protein, 7 aa, synthetic construct
  source 1..7: note = 1A7[CD28]_H1_L1.71 [S-S] vlCDR2
AASSLQS

SEQ ID NO: 2614 - protein, 9 aa, synthetic construct
  source 1..9: note = 1A7[CD28]_H1_L1.71 [S-S] vlCDR3
QQVYSTPFT

SEQ ID NO: 2615 - protein, 248 aa, synthetic construct
  source 1..248: note = 1A7[CD28]_H1_L1.71 [S-S] scFv
EVQLLESGGGLVQPGGSLRLSCAASGFTFSSYAMSWVRQAPGKCLEWVSTISGSGDSTYYADSVKGRFTISRDNSKNTLYLQMNSLRAEDTAVYYCAKSGPGLRQVGFDYWGQGTLVTVSSGKPGSGKPGSGKPGSGKPGSDIQMTQSPSSLSASVGDRVTITCRASQSISSYLNWYQQKPGKAPKLLIYAASSLQSGVPSRFSGSGSGTDFTLTISSLQPEDFATYYCQQVYSTPFTFGCGTKLEIK

SEQ ID NO: 2616 - protein, 121 aa, synthetic construct; identical to SEQ ID NO: 2598
  source 1..121: note = 1A7[CD28]_H1.1_L1.71 [S-S] Variable Heavy (vh) Domain

SEQ ID NO: 2617 - protein, 5 aa, synthetic construct
  source 1..5: note = 1A7[CD28]_H1.1_L1.71 [S-S] vhCDR1
SYYMS

SEQ ID NO: 2618 - protein, 17 aa, synthetic construct
  source 1..17: note = 1A7[CD28]_H1.1_L1.71 [S-S] vhCDR2
TISGSGDSTYYADSVKG

SEQ ID NO: 2619 - protein, 12 aa, synthetic construct
  source 1..12: note = 1A7[CD28]_H1.1_L1.71 [S-S] vhCDR3
SGPGLRQVGFDY

SEQ ID NO: 2620 - protein, 107 aa, synthetic construct; identical to SEQ ID NO: 2611
  source 1..107: note = 1A7[CD28]_H1.1_L1.71 [S-S] Variable Light (vl) Domain

SEQ ID NO: 2621 - protein, 11 aa, synthetic construct
  source 1..11: note = 1A7[CD28]_H1.1_L1.71 [S-S] vlCDR1
RASQSISSYLN

SEQ ID NO: 2622 - protein, 7 aa, synthetic construct
  source 1..7: note = 1A7[CD28]_H1.1_L1.71 [S-S] vlCDR2
AASSLQS

SEQ ID NO: 2623 - protein, 9 aa, synthetic construct
  source 1..9: note = 1A7[CD28]_H1.1_L1.71 [S-S] vlCDR3
QQVYSTPFT

SEQ ID NO: 2624 - protein, 248 aa, synthetic construct
  source 1..248: note = 1A7[CD28]_H1.1_L1.71 [S-S] scFv
EVQLLESGGGLVQPGGSLRLSCAASGFTFSSYYMSWVRQAPGKCLEWVSTISGSGDSTYYADSVKGRFTISRDNSKNTLYLQMNSLRAEDTAVYYCAKSGPGLRQVGFDYWGQGTLVTVSSGKPGSGKPGSGKPGSGKPGSDIQMTQSPSSLSASVGDRVTITCRASQSISSYLNWYQQKPGKAPKLLIYAASSLQSGVPSRFSGSGSGTDFTLTISSLQPEDFATYYCQQVYSTPFTFGCGTKLEIK

SEQ ID NO: 2625 - protein, 121 aa, synthetic construct
  source 1..121: note = 1A7[CD28]_H1.14_L1 [S-S] Variable Heavy (vh) Domain
EVQLLESGGGLVQPGGSLRLSCAASGFTFSSYYMSWVRQAPGKCLEWVSTISESGDSTYYADSVKGRFTISRDNSKNTLYLQMNSLRAEDTAVYYCAKSGPGLRQVGFDYWGQGTLVTVSS

SEQ ID NO: 2626 - protein, 5 aa, synthetic construct
  source 1..5: note = 1A7[CD28]_H1.14_L1 [S-S] vhCDR1
SYYMS

SEQ ID NO: 2627 - protein, 17 aa, synthetic construct
  source 1..17: note = 1A7[CD28]_H1.14_L1 [S-S] vhCDR2
TISESGDSTYYADSVKG

SEQ ID NO: 2628 - protein, 12 aa, synthetic construct
  source 1..12: note = 1A7[CD28]_H1.14_L1 [S-S] vhCDR3
SGPGLRQVGFDY

SEQ ID NO: 2629 - protein, 107 aa, synthetic construct; identical to SEQ ID NO: 2602
  source 1..107: note = 1A7[CD28]_H1.14_L1 [S-S] Variable Light (vl) Domain

SEQ ID NO: 2630 - protein, 11 aa, synthetic construct
  source 1..11: note = 1A7[CD28]_H1.14_L1 [S-S] vlCDR1
RASQSISSYLN

SEQ ID NO: 2631 - protein, 7 aa, synthetic construct
  source 1..7: note = 1A7[CD28]_H1.14_L1 [S-S] vlCDR2
AASSLQS

SEQ ID NO: 2632 - protein, 9 aa, synthetic construct
  source 1..9: note = 1A7[CD28]_H1.14_L1 [S-S] vlCDR3
QQSYSTPFT

SEQ ID NO: 2633 - protein, 248 aa, synthetic construct
  source 1..248: note = 1A7[CD28]_H1.14_L1 [S-S] scFv
EVQLLESGGGLVQPGGSLRLSCAASGFTFSSYYMSWVRQAPGKCLEWVSTISESGDSTYYADSVKGRFTISRDNSKNTLYLQMNSLRAEDTAVYYCAKSGPGLRQVGFDYWGQGTLVTVSSGKPGSGKPGSGKPGSGKPGSDIQMTQSPSSLSASVGDRVTITCRASQSISSYLNWYQQKPGKAPKLLIYAASSLQSGVPSRFSGSGSGTDFTLTISSLQPEDFATYYCQQSYSTPFTFGCGTKLEIK

SEQ ID NO: 2634 - protein, 121 aa, synthetic construct; identical to SEQ ID NO: 2625
  source 1..121: note = 1A7[CD28]_H1.14_L1.71 [S-S] Variable Heavy (vh) Domain

SEQ ID NO: 2635 - protein, 5 aa, synthetic construct
  source 1..5: note = 1A7[CD28]_H1.14_L1.71 [S-S] vhCDR1
SYYMS

SEQ ID NO: 2636 - protein, 17 aa, synthetic construct
  source 1..17: note = 1A7[CD28]_H1.14_L1.71 [S-S] vhCDR2
TISESGDSTYYADSVKG

SEQ ID NO: 2637 - protein, 12 aa, synthetic construct
  source 1..12: note = 1A7[CD28]_H1.14_L1.71 [S-S] vhCDR3
SGPGLRQVGFDY

SEQ ID NO: 2638 - protein, 107 aa, synthetic construct; identical to SEQ ID NO: 2611
  source 1..107: note = 1A7[CD28]_H1.14_L1.71 [S-S] Variable Light (vl) Domain

SEQ ID NO: 2639 - protein, 11 aa, synthetic construct
  source 1..11: note = 1A7[CD28]_H1.14_L1.71 [S-S] vlCDR1
RASQSISSYLN

SEQ ID NO: 2640 - protein, 7 aa, synthetic construct
  source 1..7: note = 1A7[CD28]_H1.14_L1.71 [S-S] vlCDR2
AASSLQS

SEQ ID NO: 2641 - protein, 9 aa, synthetic construct
  source 1..9: note = 1A7[CD28]_H1.14_L1.71 [S-S] vlCDR3
QQVYSTPFT

SEQ ID NO: 2642 - protein, 248 aa, synthetic construct
  source 1..248: note = 1A7[CD28]_H1.14_L1.71 [S-S] scFv
EVQLLESGGGLVQPGGSLRLSCAASGFTFSSYYMSWVRQAPGKCLEWVSTISESGDSTYYADSVKGRFTISRDNSKNTLYLQMNSLRAEDTAVYYCAKSGPGLRQVGFDYWGQGTLVTVSSGKPGSGKPGSGKPGSGKPGSDIQMTQSPSSLSASVGDRVTITCRASQSISSYLNWYQQKPGKAPKLLIYAASSLQSGVPSRFSGSGSGTDFTLTISSLQPEDFATYYCQQVYSTPFTFGCGTKLEIK

SEQ ID NO: 2643 - protein, 121 aa, synthetic construct
  source 1..121: note = 1A7[CD28]_H1.129_L1.71 [S-S] Variable Heavy (vh) Domain
EVQLLESGGGLVQPGGSLRLSCAASGFTFSSYYMSWVRQAPGKCLEWVSTISERADSTYYADSVKGRFTISRDNSKNTLYLQMNSLRAEDTAVYYCAKSGPGLRQVGFDYWGQGTLVTVSS

SEQ ID NO: 2644 - protein, 5 aa, synthetic construct
  source 1..5: note = 1A7[CD28]_H1.129_L1.71 [S-S] vhCDR1
SYYMS

SEQ ID NO: 2645 - protein, 17 aa, synthetic construct
  source 1..17: note = 1A7[CD28]_H1.129_L1.71 [S-S] vhCDR2
TISERADSTYYADSVKG

SEQ ID NO: 2646 - protein, 12 aa, synthetic construct
  source 1..12: note = 1A7[CD28]_H1.129_L1.71 [S-S] vhCDR3
SGPGLRQVGFDY

SEQ ID NO: 2647 - protein, 107 aa, synthetic construct; identical to SEQ ID NO: 2611
  source 1..107: note = 1A7[CD28]_H1.129_L1.71 [S-S] Variable Light (vl) Domain

SEQ ID NO: 2648 - protein, 11 aa, synthetic construct
  source 1..11: note = 1A7[CD28]_H1.129_L1.71 [S-S] vlCDR1
RASQSISSYLN

SEQ ID NO: 2649 - protein, 7 aa, synthetic construct
  source 1..7: note = 1A7[CD28]_H1.129_L1.71 [S-S] vlCDR2
AASSLQS

SEQ ID NO: 2650 - protein, 9 aa, synthetic construct
  source 1..9: note = 1A7[CD28]_H1.129_L1.71 [S-S] vlCDR3
QQVYSTPFT

SEQ ID NO: 2651 - protein, 248 aa, synthetic construct
  source 1..248: note = 1A7[CD28]_H1.129_L1.71 [S-S] scFv
EVQLLESGGGLVQPGGSLRLSCAASGFTFSSYYMSWVRQAPGKCLEWVSTISERADSTYYADSVKGRFTISRDNSKNTLYLQMNSLRAEDTAVYYCAKSGPGLRQVGFDYWGQGTLVTVSSGKPGSGKPGSGKPGSGKPGSDIQMTQSPSSLSASVGDRVTITCRASQSISSYLNWYQQKPGKAPKLLIYAASSLQSGVPSRFSGSGSGTDFTLTISSLQPEDFATYYCQQVYSTPFTFGCGTKLEIK

SEQ ID NO: 2652 - protein, 121 aa, synthetic construct
  source 1..121: note = 1A7[CD28]_H1.106_L1.71 [S-S] Variable Heavy (vh) Domain
EVQLLESGGGLVQPGGSLRLSCAASGFTFSSYYMSWVRQAPGKCLEWVSTISERGDSTYYADSVKGRFTISRDNSKNTLYLQMNSLRAEDTAVYYCAKSGPGLRQVGFDYWGQGTLVTVSS

SEQ ID NO: 2653 - protein, 5 aa, synthetic construct
  source 1..5: note = 1A7[CD28]_H1.106_L1.71 [S-S] vhCDR1
SYYMS

SEQ ID NO: 2654 - protein, 17 aa, synthetic construct
  source 1..17: note = 1A7[CD28]_H1.106_L1.71 [S-S] vhCDR2
TISERGDSTYYADSVKG

SEQ ID NO: 2655 - protein, 12 aa, synthetic construct
  source 1..12: note = 1A7[CD28]_H1.106_L1.71 [S-S] vhCDR3
SGPGLRQVGFDY

SEQ ID NO: 2656 - protein, 107 aa, synthetic construct; identical to SEQ ID NO: 2611
  source 1..107: note = 1A7[CD28]_H1.106_L1.71 [S-S] Variable Light (vl) Domain

SEQ ID NO: 2657 - protein, 11 aa, synthetic construct
  source 1..11: note = 1A7[CD28]_H1.106_L1.71 [S-S] vlCDR1
RASQSISSYLN

SEQ ID NO: 2658 - protein, 7 aa, synthetic construct
  source 1..7: note = 1A7[CD28]_H1.106_L1.71 [S-S] vlCDR2
AASSLQS

SEQ ID NO: 2659 - protein, 9 aa, synthetic construct
  source 1..9: note = 1A7[CD28]_H1.106_L1.71 [S-S] vlCDR3
QQVYSTPFT

SEQ ID NO: 2660 - protein, 248 aa, synthetic construct
  source 1..248: note = 1A7[CD28]_H1.106_L1.71 [S-S] scFv
EVQLLESGGGLVQPGGSLRLSCAASGFTFSSYYMSWVRQAPGKCLEWVSTISERGDSTYYADSVKGRFTISRDNSKNTLYLQMNSLRAEDTAVYYCAKSGPGLRQVGFDYWGQGTLVTVSSGKPGSGKPGSGKPGSGKPGSDIQMTQSPSSLSASVGDRVTITCRASQSISSYLNWYQQKPGKAPKLLIYAASSLQSGVPSRFSGSGSGTDFTLTISSLQPEDFATYYCQQVYSTPFTFGCGTKLEIK

SEQ ID NO: 2661 - protein, 121 aa, synthetic construct; identical to SEQ ID NO: 2643
  source 1..121: note = 1A7[CD28]_H1.129_L1 [S-S] Variable Heavy (vh) Domain

SEQ ID NO: 2662 - protein, 5 aa, synthetic construct
  source 1..5: note = 1A7[CD28]_H1.129_L1 [S-S] vhCDR1
SYYMS

SEQ ID NO: 2663 - protein, 17 aa, synthetic construct
  source 1..17: note = 1A7[CD28]_H1.129_L1 [S-S] vhCDR2
TISERADSTYYADSVKG

SEQ ID NO: 2664 - protein, 12 aa, synthetic construct
  source 1..12: note = 1A7[CD28]_H1.129_L1 [S-S] vhCDR3
SGPGLRQVGFDY

SEQ ID NO: 2665 - protein, 107 aa, synthetic construct; identical to SEQ ID NO: 2602
  source 1..107: note = 1A7[CD28]_H1.129_L1 [S-S] Variable Light (vl) Domain

SEQ ID NO: 2666 - protein, 11 aa, synthetic construct
  source 1..11: note = 1A7[CD28]_H1.129_L1 [S-S] vlCDR1
RASQSISSYLN

SEQ ID NO: 2667 - protein, 7 aa, synthetic construct
  source 1..7: note = 1A7[CD28]_H1.129_L1 [S-S] vlCDR2
AASSLQS

SEQ ID NO: 2668 - protein, 9 aa, synthetic construct
  source 1..9: note = 1A7[CD28]_H1.129_L1 [S-S] vlCDR3
QQSYSTPFT

SEQ ID NO: 2669 - protein, 248 aa, synthetic construct
  source 1..248: note = 1A7[CD28]_H1.129_L1 [S-S] scFv
EVQLLESGGGLVQPGGSLRLSCAASGFTFSSYYMSWVRQAPGKCLEWVSTISERADSTYYADSVKGRFTISRDNSKNTLYLQMNSLRAEDTAVYYCAKSGPGLRQVGFDYWGQGTLVTVSSGKPGSGKPGSGKPGSGKPGSDIQMTQSPSSLSASVGDRVTITCRASQSISSYLNWYQQKPGKAPKLLIYAASSLQSGVPSRFSGSGSGTDFTLTISSLQPEDFATYYCQQSYSTPFTFGCGTKLEIK

SEQ ID NO: 2670 - protein, 121 aa, synthetic construct; identical to SEQ ID NO: 2652
  source 1..121: note = 1A7[CD28]_H1.106_L1 [S-S] Variable Heavy (vh) Domain

SEQ ID NO: 2671 - protein, 5 aa, synthetic construct
  source 1..5: note = 1A7[CD28]_H1.106_L1 [S-S] vhCDR1
SYYMS

SEQ ID NO: 2672 - protein, 17 aa, synthetic construct
  source 1..17: note = 1A7[CD28]_H1.106_L1 [S-S] vhCDR2
TISERGDSTYYADSVKG

SEQ ID NO: 2673 - protein, 12 aa, synthetic construct
  source 1..12: note = 1A7[CD28]_H1.106_L1 [S-S] vhCDR3
SGPGLRQVGFDY

SEQ ID NO: 2674 - protein, 107 aa, synthetic construct; identical to SEQ ID NO: 2602
  source 1..107: note = 1A7[CD28]_H1.106_L1 [S-S] Variable Light (vl) Domain

SEQ ID NO: 2675 - protein, 11 aa, synthetic construct
  source 1..11: note = 1A7[CD28]_H1.106_L1 [S-S] vlCDR1
RASQSISSYLN

SEQ ID NO: 2676 - protein, 7 aa, synthetic construct
  source 1..7: note = 1A7[CD28]_H1.106_L1 [S-S] vlCDR2
AASSLQS

SEQ ID NO: 2677 - protein, 9 aa, synthetic construct
  source 1..9: note = 1A7[CD28]_H1.106_L1 [S-S] vlCDR3
QQSYSTPFT

SEQ ID NO: 2678 - protein, 248 aa, synthetic construct
  source 1..248: note = 1A7[CD28]_H1.106_L1 [S-S] scFv
EVQLLESGGGLVQPGGSLRLSCAASGFTFSSYYMSWVRQAPGKCLEWVSTISERGDSTYYADSVKGRFTISRDNSKNTLYLQMNSLRAEDTAVYYCAKSGPGLRQVGFDYWGQGTLVTVSSGKPGSGKPGSGKPGSGKPGSDIQMTQSPSSLSASVGDRVTITCRASQSISSYLNWYQQKPGKAPKLLIYAASSLQSGVPSRFSGSGSGTDFTLTISSLQPEDFATYYCQQSYSTPFTFGCGTKLEIK

SEQ ID NO: 2679 - protein, 107 aa, synthetic construct
  source 1..107: note = IGKV1-39 Germline VL Variable light (vl) domain
DIQMTQSPSSLSASVGDRVTITCRASQSISSYLNWYQQKPGKAPKLLIYAASSLQSGVPSRFSGSGSGTDFTLTISSLQPEDFATYYCQQSYSTPYTFGQGTKLEIK

SEQ ID NO: 2680 - protein, 11 aa, synthetic construct
  source 1..11: note = IGKV1-39 Germline VL vlCDR1
RASQSISSYLN

SEQ ID NO: 2681 - protein, 7 aa, synthetic construct
  source 1..7: note = IGKV1-39 Germline VL vlCDR2
AASSLQS

SEQ ID NO: 2682 - protein, 9 aa, synthetic construct
  source 1..9: note = IGKV1-39 Germline VL vlCDR3
QQSYSTPYT

SEQ ID NO: 2683 - protein, 4 aa, synthetic construct
YMNM

SEQ ID NO: 2684 - protein, 5 aa, synthetic construct
GSGGS

SEQ ID NO: 2685 - protein, 4 aa, synthetic construct
GGGS

1.-185. (canceled)

186. An anti-STEAP1 x anti-CD28 bispecific antibody comprising:
a) a means for binding STEAP1 ; and
b) a means for binding CD28.

187. A heterodimeric antibody comprising:
a) a first monomer comprising:
i) a single chain variable fragment (scFv); and
ii) a first Fc domain, wherein the scFv is covalently attached to the N-terminus of the first Fc domain using a domain linker;
b) a second monomer comprising, from N-terminal to C-terminal, a VH1-CH1-hinge-CH2-CH3, wherein VH1 is a first variable heavy domain and CH2-CH3 is a second Fc domain; and
c) a light chain comprising, from N-terminal to C- terminal, VL1-CL, wherein VL1 is a first variable light domain and CL is a constant light domain,
wherein the scFv comprises a second VH domain (VH2), a scFv linker, and a second variable light domain (VL2),
wherein the VH1 and the VL1 together form a first antigen binding domain (ABD) and the VH2 and the VL2 together form a second ABD, and
wherein one of the first ABD and the second ABD is a CD28 binding domain and the other of the first ABD and second ABD is a Six Transmembrane Epithelial Antigen of Prostate 1 (STEAP1 ) binding domain.

188. The heterodimeric antibody according to claim 187, wherein the first ABD is the STEAP1 binding domain and the second ABD is the CD28 binding domain.

189. The heterodimeric antibody according to claim 188, wherein VH1 has an amino acid sequence as set forth in any one of SEQ ID NOs: 463, 471, and 1466-1696, and VL1 has an amino acid sequence as set forth in any one of SEQ ID Nos: 467, 475, and 1697-1815.

190. The heterodimeric antibody according to claim 188, wherein VH2 has an amino acid sequence as set forth in any one of SEQ ID NOs: 106, and 116-184-and VL2 has an amino acid sequence as set forth in any one of SEQ ID Nos: 110, 185-290, and 2679.

191. A nucleic acid composition comprising:
a) a first nucleic acid encoding the first monomer of claim 187;
b) a second nucleic acid encoding the second monomer of claim 187; and
c) a third nucleic acid encoding the light chain of claim 187.

192. An expression vector composition comprising:
a) a first expression vector comprising a first nucleic acid encoding the first monomer of claim 187;
b) a second expression vector comprising a second nucleic acid encoding the second monomer of claim 187; and
c) a third expression vector comprising a third nucleic acid encoding the light chain of claim 187.

193. A host cell comprising the expression vector composition of claim 192.

194. A method of making a heterodimeric antibody comprising culturing the host cell of claim 193 under conditions wherein the heterodimeric antibody is expressed and recovering the heterodimeric antibody.

195. A heterodimeric antibody comprising:
a) a first monomer comprising from N-terminal to C-terminal, VH1-CH1-first domain linker-scFv-second domain linker-CH2-CH3,
wherein VH1 is a first variable heavy domain, and CH2-CH3 is a first Fc domain;
b) a second monomer, comprising from N-terminal to C-terminal, a VH1-CH1-hinge-CH2-CH3, wherein CH2-CH3 is a second Fc domain;
c) a first light chain comprising, from N-terminal to C-terminal, VL1-CL, wherein VL1 is a first variable light domain and CL is a constant light domain; and
d) a second light chain comprising, from N-terminal to C-terminal, VL1-CL, wherein VL1 is a first variable light domain and CL is a constant light domain,
wherein the scFv comprises a second VH domain (VH2), a scFv linker, and a second variable light domain (VL2),
wherein the VH1 of the first monomer and the VL1 of the first light chain and the VH1 of the second monomer and the VL1 of the second light chain each form a first antigen binding domain (ABD), and the VH2 and the VL2 form a second ABD, and
wherein the first ABDs are Six Transmembrane Epithelial Antigen of Prostate 1 (STEAP1 ) binding domains and the second ABD is a CD28 binding domain, or the first ABDs are CD28 binding domains and the second ABD is a STEAP1 binding domain.

196. The heterodimeric antibody according to claim 195, wherein the first ABDs are the STEAP1 binding domains and the second ABD is the CD28 binding domain.

197. The heterodimeric antibody according to claim 196, wherein the VH1 of the first monomer and the VH1 of second monomer each have an amino acid sequence as set forth in any one of SEQ ID NOs: 463, 471, and 1466-1696, and the VL1 of the first light chain and the VL1 of the second light chain each have an amino acid sequence as set forth in any one of SEQ ID Nos: 467, 475, and 1697-1815.

198. The heterodimeric antibody according to claim 196, wherein VH2 has an amino acid sequence as set forth in any one of SEQ ID NOs: 106, and 116-184-and VL2 has an amino acid sequence as set forth in any one of SEQ ID Nos: 110, 185-290, and 2679.

199. A nucleic acid composition comprising:
a) a first nucleic acid encoding the first monomer of claim 195;
b) a second nucleic acid encoding the second monomer of claim 195; and
c) a third nucleic acid encoding the first light chain and second light chain of claim 195

200. An expression vector composition comprising:
a) a first expression vector comprising a first nucleic acid encoding the first monomer of claim 195;
b) a second expression vector comprising a second nucleic acid encoding the second monomer of claim 195; and
c) a third expression vector comprising a third nucleic acid encoding the first light chain and second light chain of claim 195.

201. A host cell comprising the expression vector composition of claim 200.

202. A method of making a heterodimeric antibody comprising culturing the host cell of claim 201 under conditions wherein the heterodimeric antibody is expressed and recovering the heterodimeric antibody.

203. A STEAP1 binding domain, wherein the STEAP1 binding domain comprises:
a) a variable heavy domain (VH) having an amino acid sequence as set forth in any one of SEQ ID NOs: 463, 471, and 1466-1696; and
b) a variable light domain (VL) having an amino acid sequence as set forth in any one of SEQ ID Nos: 467, 475, and 1697-1815.

204. A nucleic acid composition comprising a first nucleic acid encoding the VH of claim 203; and a second nucleic acid encoding the VL of claim 203.

205. An expression vector composition comprising a first expression vector comprising a first nucleic acid encoding the VH of claim 203; and a second expression vector comprising a second nucleic acid encoding the VL of claim 203.

206. A host cell comprising the expression vector composition of claim 205.

207. A method of making a STEAP1 binding domain comprising culturing the host cell of claim 206 under conditions wherein the heterodimeric antibody is expressed and recovering the STEAP1 binding domain.
